United States Patent Application Publication US 2023/0172999 A1 - sequence listing, part 7

SEQ ID NO: 9 - DNA, 2936244 bp, Eubacterium rectale (residues 1-1,468,122 of 2,936,244)
  misc_feature (604733)..(604884): n is a, c, g, or t
  misc_feature (1812041)..(1812050): n is a, c, g, or t
  misc_feature (2498666)..(2498675): n is a, c, g, or t
  misc_feature (2498920)..(2498929): n is a, c, g, or t
  misc_feature (2502606)..(2502615): n is a, c, g, or t
  misc_feature (2565559)..(2565568): n is a, c, g, or t
  misc_feature (2720136)..(2720145): n is a, c, g, or t
  misc_feature (2720395)..(2720453): n is a, c, g, or t
  misc_feature (2838097)..(2838250): n is a, c, g, or t
ttttctatacttcaaaatacttgaaagtatagtgtttatgcggataatcgaaaattagatataaaatttacattgaattaccaatcaataattatatgattaaagggtcaaaataccttttgaccctcatatcattatataattatacaaatcatgccaccatttgagtcattcacaatcttttgcatggtttcctgaagctttatctggcattcatcatccatctgcattattttgcttcttattccgtcctccataagctcaccgacagactttccaaaaatattggtcttccagactccactgtcactgttttcaccatttttgatgtaatctatcagatcctctgcctgttccctgcttccgactatcggcgctatctcggtctcgatattagcccttatcatatgtattgacggtgaaatagccttcatttttacgccaaacttgtttccatgggctataagcaccggctcctccattctgatatcagacagctgtggcatcacaactccataacccttctgctgcaccgatgaaaaagcatccttaatcttttcgtattcattcttttcctcagtgagtgaaagaatcagggaaatcagctccttttccccggaaatagtcacaccgcacagcgcggaaatattctcgtagtagtacttctctgcaatctcaattttaacctttaccacaccatcagacagccccatcccggcaagagataccgcttttaatatatccccatccgattcaggcatatctatgctcatctgtgcgacatccttcagctttgaagcccttgcaagaaaagtctttgcatatgtaattacagcctgctttacatgattgtcataaggcagaagctgcacccatttcggtatatcatagtccactctcgtgactgcaaattcatataagagcttttccataatatctgtaatctgtcccatgcaaagcttttcacagtctataggaatagcagccgctttatactctctgctaagtgactcgcataaaagtctcgtttctgccgcaaaaggctttgtagtatttaccacaattacaaatggctttcctgaagcctcaagctgcatgacggtttctctttctgctgcctcataactctgtctttttatatcgcctatgctgccatcggtggttacaagcacagccactgtcgaatgctcctctattaccttttttgtacctacaactgcagcctcctcaaaaggtatatcctcgtcgaaccatggtgttttgaccatacgctcgccgtcctcctcgagataaccgacagcatcccccaccgtaaaacccacacagtccacaaggcgtaccttcacagcgctgccatcatccagactgatagtaaccgcatcctgtggaataaatttcggttcagtcgtcataatagtctttcctttgcctgattgcggcagttcatcgaccgcacgctttttagcatactcattgtccatcttcgggattacacaaagctccatgaaatgctttataaatgtggacttgcctgtgcgcacaggaccgacgacacctatgtaaatctcgccgtttgtgcggcatctgatatctttatataaatcaaactctttactgtccatattactgcccataaaagcttcctccatacactttattctataatcaaagtgtattcacctactctttgaattattacacataaaaaggccacaggcttcaaaacagataacctgtggtcttttgtaataacatatagtattttaaaccaaactacttagcagcctttttctcacatcctgctgtcttgcttgtagaagtatcagctgtttctttagcatctgatttgtcagaagcctcctcaggctcctcgcgcagacgtgcgtacatctgcatacacttgtggagcttctttgcaagcttattgtctatctgctcaggagtagctctccactgccagttgccaccggtagttgaaggaatgttgatacgagcctttgaatcaagtccaagcagatcctgcataggaacaatagccatatcggcaactgatgaccatgccgcacgcatcatgccccagttgtagccctcctcctttgtgaggtttaagtaatcctttgcaaaccttacgcaatcctttggagctgtcttcatccagcccataactgtgtcattgtcatgggtacctgtgtatacaacacagtgctgcggatagttatgtggcagataatcgctgtcttctcttgaatcgaaggcaaactggataaccttcatgccagggaagcctgaatcctttaaaagcttctttacggaaggtgtgaggaagccgaggtcctccacgatgataggaagcttgccaagcttcttctcaagcacgttgaataaatccatgccaggtccatctttccatacaccgttctttgctgtatcatcctttgcaggaatagcatagaatgaatcaaaacctctgaaatgatcgattcgcacgatatcataaagctttgccatagcactgatacgctttgtccaccagctgtagctgtccttcttcataacatcccatctgaaaagaggattaccccagagctgtccgtcagctgagaaagcatcaggaggacatcctgccacctcgattggatttaagtctttatcgagatagaactgtgtaggattagcccatacatctgctgaatccatggcaacataaataggtacatctccgataattcttatgcccttttcattagcatatgcctttaaagcagtccactgcttgaagaagagatactggagcatcttgtagaaggcaatatcatcagcatacttctcctttgcttcttccatagcctcaggttttctaaacttgagagcatcatcccactcgctccatgccactccgccattggcatcctttaatgccataaagagtgtgtactcatcaagccactctgcctctttactgcagaatgcttcatagtcagccggtgttttctttgaaaaacgctcatatgcctttcttaaaagagcatatctattgacatacataatgccatagtctacatactgtggctttttgccccacttatatgactcgcactccttctttgtcagaagcttgtccttgcataaaagctccagatcgataaaataaggattgcctgcgaagcttgaaaatgactggtatggagaatctccatagctggtaggacagattggaagaatctgccagtatgtctgacctcccttctcaaggaaatcgacaaaacgtctcgcctcctttcccatagttccaataccatactgtgatggcagtgatgagattggcattaatacaccgctagttctcatgttatttttcctcccttttgttgtatacgcattgtttggctgcgtgatcctgtattttaaaataatatacaatatacatatgaaatcatatgatattttcgctttatttagttattataacatcataaagtgcaacttgtaaattaaattagttaatgttaatatcaaattaataaaaagtttaaaagaggtgtaacataatgaatgaaacaaccaggcaattgattgtgcataaggtaaagcataatacgaaacgtcttataacatccattaaatgggtaatcttttctatcgttgtcggcatagtcgcaggaagctgcggcaccgccttttattttgccctgtcggtcgtaaccgatttcagaatgaaatacccttggctcatttactttctgccaatcggcggacttgccattgtaggactctatcatctgtgtaaagacgataacgacaccggaaccaatctggtaatatcagctatccattcaggcgacaaggtgccctttaaaatggccccgcttatatttgtatccacacttatcactcacctgttcggtggctctgccggccgtgagggtgctgctctgcagatgggaggcagcatcggaagctctataggcagggtatttagatttgatgaaaaggacaagcatgtcatgattatgtgtggcatgagcgctgcattcagtgcactgtttggcactccgatggcagccgctattttctccatggagatgataagcgtcggggtcatgtattatatagcactcgttccatgtgtgataagctccctcatcgctcacggtatcgcatcatacttcaatgttacaaatgaattttttgctattgaaaacataccggattttactattttaaactcagtaaaaatatctgcgcttgcaatactatgcgcgctcgtaagcatactcttttgtgtggttcttcactcaggtgaggcgctgtacaaaaaatatctgccaaacaaatatacaagagtattcattggtggctgctttgtcatcatagcaactatgcttgtaggaaaccagacctacaatggcacaggaatgagtgtcatccaaagcagtatagacggttctgtcagacctgaagcatttctgctaaaaatcatcttcaccgcactaactcttggcgcaggctttaagggcggcgagattgtaccatcctttttcataggcgcaacctttggatgcctgttcggcaacctgacaggctttgagccatcgctgtgtgcagctgtcggtatgatttcactgttctgtggtgtcaccaactgtccgattacatcgctgctcatcagctttgagctgtttggctacgacggcatgccgtactttcttttggcaatcccattcagctatatgctgtcaggatactttggcctgtatcgcagccagaaaatcgtttattcaaaatacaagacaagctacataaataaatcaactcactaacatttgcaaactgcaaccaggcatgataccccaggtattattgcctggtcttttattgtataaagagctttatctcccgcagaagcttcatctgcgagaacctcccacaaagcatctgcaagtttaattgtgattttatttttaccggcattgtaagctacgaacaccttctctgtatcgttatcaatagtatatgctacaacgccatcaggcatatcatccatgaaatgtacggatttcttaatctcatctactgtgtcaagataaaatgacttgtgagcccttcttaatgctataagccccttatagtaggctttaaggtccgaaaactgctcagccctgtcataatctattgcattgacagagagaggactgcaatagctgttctctacaggagcaccatcagcctcactaatctttgttctcgcaaactcctctccatgcaggaaaaacggaatcccctgcgctgtaaaaaggatggctgctgcaagcttattcatacggatacgcatctcttcactctcatgtgaattggatataataaacctgtcccagagagtataattgtcgtgacatgacagatagttaatcgactgcataggcgatttggcccacttagcgcacgtaacagcctgctttagctcttcacctctgtctgcagctccattgacaaagcccagttcatccatatagaacacatgtccctttaccgcatcacgtatatcatccgaaaacatgccgatgcccggtgtccttggagcatttattttcatgccacgctctgattccggcagagtgctctctccacctgtccagccctctccgtacattattatatcaggatttatttttaagagagcttttctggcttcgtttaaggtttcgatatcaagcactcccatcagatcaaacctgaagccatcaatatgatactcactcgcccagtagcacagcgaatcaatgatatattttctgaccataggcttctctgaggctatttcattgccacaggctgatgcatcagagtactttgcagcatccagcatacggtagaaataattgcccgcagtcttgtaaaagcagctgtcatgaacattgaaggtatgattgtaaaccacatccatgattacaccaagacccgcctcatgaatcgagtgtaccatctccttatactctctcactctcacggctccattaaacggatctgtcgagtaagagccctccggcacattgtaattgtacggatcatagccccagttatactgctcctttaaggaatcactctcgtcaatgctggcaaaatcatacgacggcataagctgcagatgtgtcactcccatatccttgaaatacgaaagagttttatcctcagtaaatgccttaaacttacccggatacatagaatgagcagatgcaccggcagacacatccacgatagacacctcagtgataaccatgctcatggggtctgcaagctttggcctgtcctcatctgcaaatccatcaggatcagtctttgacaggtcaataaccatagacctatgcccatttacaccgcaggctcttgcatacggatcatgcgagctgaatgtgccatctgaggtgtgaacctcatatgtataataaacaccatccagattaccctctgccgtagcagaaaaaatactgcgaagctctccctctccgcgcaccatctcaagcctgcctgtctcggccgaatcatttcccttatcataaaaaataacaaaaacactgtccgcaacaggcgaaaacagtgtaaatgttgtcttttcctttgaataaatcgctcctaatttcatagcactatccttttcgtttattttcgtatacattataatagaatttacaataactgtaaatagggcaattcaaccaattttcaaagactttttagtcaatgtgccattttttcttttgctgatgtgaaacaatctttatatacaaagattgtggcagaaatctgccacaggttgtagcaagcttcatcctgagagtaggcactatgactgttttatgcttcatcatcctgtctatggcataattggcgcagtattcagcggaaatccccttcagcgcaaatcgcacattcgccacatcattgaactctgtatcaaccggtcccggacacagacaccccacatacacatgactgtggctctgtcgaagctcacatgcaacagcccttgaaaggctcgcaacatatgccttagaggcataataggcagccatatacggaccggcaggaataagacccgcagagcttgccacatttaagataaaacctctgtcctttaccctcatctgttttaaaagctttttcgtcaggaagtgtacagcacgtacgttgacatctatcatgcccatttccttagctatatcagtctcctcaaacaggccgcaatcaccgtagcctgcgttgtttataaatatttctatgtctttttcctcgagatagtctgaaagtctctgacactcatcaagctgcatcagatccgcggtaaaaatatcacacttaagctccttatgcgtggctttaagcttatcagaaagagctgtaagcctctcccgccttctggcaacaagaatcaggtcatacccctccttcgcaagtctctttgcaaactgctcacctattcctgagcttgctcctgtaatcactgcatacatatatcatatcccctattcttcaatcataagctctttaagtaattcatcttcttttttcatattatacacctgttttcattatcagtgctcatcaactctcacaccatgtaccacaaacctgtatgtctccccgcttgtggaacaggttgaaagagtcacaaccttgtcatcctttgtcgggactatgcctgtatccttcattgatgaggcagccatcctctgtacgaatttgccaaatgtctcgtcaggctcaaagcccacagtatactcatcactgtcatcacttaccgtttcatatgagaaaatttggtacctatacttttttccatcgacaagtatctggaaatactgatggctgtcatagtaattctcatcacggttatagtacttaagctttccaaacatcgacaggtttttcatattgtgtccataaatgattgtatgacagtcgctgaaatcagtcttgtttgaaccctcaaggaagatagagcctgcagtggcatgctctctcttaaaggtctttctgaggtaatagctgttatcccccgaatacatgacagggtagctgatatcctcattctcaaaataaatccagccaaccacatcagggttttcgctccttagaccggcgaaatcaatatctatatcatcataccacggcgactgtgcttcactgcctttcgtgctgtcatcattcttctttgaatcgtccactgcatactcatcctgcagcttctcatatgtcttatccgaggtattatagtcagaataaatcttaaacagatgataacccgaataagccacaagagacagaccaattatcagaactataaatctaattactttcttaaccatatattttctccatttttttatcagtcacaaaactgctgtagcagcttaccggctcaatatcaaattgtatcgtcatattactatttgtgtcacatgtatgattgaacctatcgataatacgcttcatgacatcggaggctgtatcgcatgagcacttcgacaaaagcacaatgtactgcgagtcactgtactttgccgccacatcacccacacgcaggcactttctaagcgccctctcaagtataagcatggaatccttcatatgactgtgattcttatccggctgactgctatacattggcacaacagtgacaagcacaagactctcaggaaccgtagagcgtgcactctttctgacctccagatgatagatttccttgaacacaggatatccgcacataaaaacgccattcatgctctcctcactgatatcgtccttcacttcatctatattgtagcttgaaacaccctttgtgactgataaaagctcctcatacaccttgttgagcatgacagtctttctaacccccagatcattgtccataatagccttggcagtctcataagtatcaaaagccatctgtacctttttggtacgcatgcgtgccaaaatcagatatgagtatatctgctcatccgaacgttcatatacaaccgccttggtgcaaagctgctcaagcttctcatagcagcctgtatcaatatacagctctgccagagcctttactgtatttacgtatctggaatggtaaaatgcattgagcgtcataaaccaatgggtatccgtcaggcgcgataggaaatcaccgttataaagtgctatggccttctcatagctttcaatagctgtctccttgctcctgctaaatgcaaactctgcctcatttatatatctgtcaaactcttcgacatcaatggatacttccacatcatcgttccatttgtacaatccgcctcttacagagactatgcactcttcgtcaaaagaagcatctcttagggccttcctgagtctgtatgccagatttttaagggcacctaccggattatcagtctcctcctcaacctgccatatagcctttgaaatgtcttctatacagacacctctgtttctgtttatcgccagatatacaaacagcttttcaagcttcttagaccgccatgccccttcctggacagatgttaagtcattacctaccgtaaagctgccaaaagtttttaatttaatcacgtaaatctccccatttctgagattaatcataaacatattaatcttttgaaatccctataaaacgcaaaaattaaatccaaattaaaatttacgcaaatcatcactgccgtcatcgacagtgttttctattttcattatcttaacaaagtatgagtagtcatcatttacctttacctcacacctgtcacccaccttgtgcccgaatatagcggcaccaagcggtgactccttgcttatcagattctttaaggaattgccccttacggttgtgacaatcttgtatgtctcagtctcatcatcatcctcaaaatacacatcaaccgtattgaacatacccacctcatcatcctttgactcatcggatatgacaacggcagtcttaatcatcttctcaagatatctgatacggctctcattctggttcttaaactgcttggcggccttgtactcgaagttctcgctcaagtcaccctgggctctcgccacctttacgtcatcaagagccttctttctgacaacgagctttctgtactctatctcgtcctccattttctttatatcatttgctgtcaattcatcatgcatatcttaaaccctcttcctgcaaaattgcgtcaaaatgtatttagagaagccctgcgataccacaaagcagcacaatcgcaccaagaactatacggtaccatccaaacacaataaagttgtgcttctttatatagcccatcaggaatttgataacaataagtgaaacaacaaatgccacaatcatcccgataatcagaatagcagcctcttcccctgtaaaatgaaatccaaatttaacaagcttcagaagactcgcaccaaacataaccggaatagcaaggaaaaatgtatactcagcggcaacagtccttgaaacaccaattaagagagctccgacaatagtagcgcctgaacgtgatgtacccggaaaaacagctgcaataagctggaaaaatccaatcataagcgcagtcgtgtagcttatgtcgacaagtgaatcaatcttggcagacttgccattatgtctggtctcaatcacaataaaagcgataccaaagagtataagcatgatagctactgtctggaaattgtaaaacagtctctcaaatacatcatcaaaaagcactccgataatagctgccggaatagttgaaacaagaatatgaaaccacagcacgaagatatcagtcttgacccatgcaccgataccggtctttgcaagaggagctttgttattcttcctgccgaatggccagatctggctccagaacaaaacaacaaccgccaaaatggctccaagctggataaccacctcaaacatactgtaaaaatcttccgggttttttcctatcctaagtggtaaaatctcattcagaagaatcatgtggccggtgctgctgataggcagccactctgtaatgccctcaacaattccaaatataacagacttgataatatcaaagatttccataaataaatttccttccttcaaaatattttctacaactaatttattatattatttttccaataacaagtctatggaatttaagaaaaatttaaatttaatcttttcatattagaaaattttttgtaaaatattcatagcaattatgaaaaagtgaaaggataaagaaaaaacatgaagaaaaaaatcagtatcatgctttgcatagtactcttcgccctgacaggctgcaccacctccggcagcacaatacgcttcggagcagccgatatcggtggaatgtactattcatttgcaaatacatttacggagcttgccaatgaacagggctatgactttacctgcaaggtccgtaccacagcaggctctaacgccaatataagacttttatccgatggctatatagagataggcctcgcacaggcagacctgatagccgacgcctacaagacaaatggagatttaagggctatagcagggctttacaccgagacctgtcagcttgtggtccgcgctgattcaaacatacagactcttgacgacctgtcaggacacactgtaagcatcggagcagaggaatccggtaccgagcgaaacgccacacagattcttgagttcgccggtatgccatcatcccttgttgccaccaaaaacctggactatatagaggccacaaaagaactaaaagccggtgatatagatgccttcttctgcactgccggactcaccaccactgtcatagatgagctctcaaaggaatgcgatataaggcttatcccgctgactgatactgtgataagcaagatgcttgaaagcagcttggcatacacaagcgaagtcatacctgccggcacatacacaggccagaccacagatataagcacaataggtgtaaaatctgtgcttatcacaaaggctgatgtatccgacgatacaattgagcagcttacatcgctcctgtttgaaaaagaaaatgagatctcctactccaactctcttaagcttgagctgacatatgactttgcaacagacgatatacctattccatttcacgatggagcgaaaaggtattataaagcctgtggatatagcacaaattaattcgcgaattaatttttagctcaatatataatattcaaaatttaataagaaaataacaagaatataatcaattaaaattgaaaggtaacacatgaaaatacaacttgacatgtaccagacactggccgttgccgtgcttgtactactacttggaaactatttaaaaaagaaaatatattttcttcagaaattctgtattccggcgcctgtcataggcggactgatttttgccatcatgacatgcatatgctatgtcacaggaatcgcagaattttcctttaatgacacactgcgcgaggtctgcatggtattcttcttcacatctgtaggctttcaggcaaatctcaaggtattaaaaagcggaggcaaatcgctcatcgttttcttgggactggttatagtgcttatcatattacaaaacttaaccgccgtggggcttgcaaagctcttaaatctgaatccgctaatcggcatgtgcaccggctctattcctatggttggcggacatggcaccgcaggagcctttggcccggtgctagaggacttgaacataaagggtgccacgaccatctgtacagccgcagctaccttcggtctcatctttggaagcctgataggcggacctctaggaaaaagactgattgaaaagcatagcctgattaatacagcagcaaacgaggacgacagcctgctggtggaggatgagaaaaagcatgagcgccacacaaatatgtacgctgatgccgtattccagcttatcctggcaataggtgtcggaactatctttacaatgcttctcacaaagactgggctcaccttcccaatatatataggagcgatgctcgcagccgcactcatgcgaaacatatgtgagtacacaggaatcgccaccatccatatgggagagataaatgacctgggaggtataagcctctctctattcctaggcatggcaatgatcacactaaggctctgggagcttgcatcactcgctctcccactcgtcatactgcttgcagcacaggtgcttctcataatcatattcacgtatgttatcgagttcaacatcatggggcgcgactacgatgcagccatacttgtatcaggcacctgcggcttcggaaccggagccacaccaaacgccatggcaaatatgcaggctgtctgcgaccaatatgtgccatccatcaaggcatatctgctcataccgctcgtaggaagcctgtttgccgactttttgaacagccttgtaatcacattctttataaacctactgtaaaacaaccggagaaaaatatgtttgaaaaactgaaaaaaatatttaaaaacagagaagaaaaagaaaaacataattacgatttaacttttgacaacgtggcaatacctgaggtgcacgtaaaaagcaccaaaagccacgaggacgctgataaagaaaatgcacctatcagctatgacaatgttgccatacctgaggtgcatatcagaaacagaaaaaataaataaactaaacaatatgtatataatgcaaaaaggactcccaagggccatgtcaaaattcttaacttaatgacattgctctcaaagagttcttttttattgccttataacacttcaattattgaatcactccatatgccttttgccctttcacaaagctcctatccttccctgcttattgtccttattctgccttctcaacagatattatcttcccctcaaacggatccacctctgaaatagtacctgtatacttaacattcaccttatctccacttgcaacaccctcgagtccgtcaggcttctcatcgaaggtaaagctgtatggtgtatccttatcatcagtcactacaaacatgaagtcctttatgtcatcgattgttcctgtaagctcattctcttcctgtgagcccttttcaccttcatccttggtatcagcctgctttgcactttcggtgcctgctgccttatcctgctttgtatcgctctgtccgcagcctgcaaacaagccggcgcaaagcatagctcctattacaattgtaatcagttttttcttcattatgatatacctctttctttatttataagcactactatgagtacgttttctaaagagtactcttctatccacctaaagtaaatagaatacataaaacattaaaaaaatcttacgaattactgcttttttgagcctcttgcgagccttgcaggataccatttttcaaaccatccggtaaatatgcccatcaatacaggcatcagattgtttacgacaataagtgtagctccaacacctgcctttttcagcagaaatgtccacactgctgtcaacacgtataatactccccatgccgccgcaagtatataattcgtcttcataaagagaggatttttatgtgcggcttcaccgccataattgtatttcacatatgttgcgcataaaggctcctttgtcaggcatgaaaccagccagaacagcccaaacaccagatatccgatatctgttgatatgtcacctgctcctgtcaggcttgcaatcgcagaaagtgtagcaacagcaacaattgagagctgatcccatattacaaatttatgttttctcataataaaaggtatagcggatgccaccaaaagagcaatcacagaacccttttcagtattgacagaaactgctatccaaaacgtaatccatggtatgagcattgtcatcatggatggatttttctgcacctccacaccttgtgatgttttttctgtctctttgactgccgatgtacttccaaaaaatttatcccagtttaccatcaaggaaaaatcacctgtcaccgtatacatctgctttcccaatgcctctgcgccacctatctcgcctcgggaaatagccgaccataccgtaaaaggcgtatctatgcgtgtagtcgcggcaaggctttggtcagtaagcacctcactacctttatcatcaagctttatttggtatgtatgcttcaaatcggtatagcatatctcaagcacgcgttcctttccgtcataggtatccttattgtataatgcagccatctgtctggtgaaaacaaggtcatccgcttccttttgtcctgttgtcctgctgattccccagctggcatccgccatattttcaaatacctcccttggatataaaagagtatggagcgccgcttctgttttttcagatatttttcctgtgatggcatattctgccccggcactttttaccgtagccagatattcgtcagtcctctttgacagctcttttacacgaaacagctcaccctgaccacaaaatattgttgtataatgcccttttccaaggaaatgatcaaacatccgaagtacactgtcataattttcctctgcagaataaaagccacaggtagagattagcacatgccttttgccttccatgtcatatctgcagtcatggctgccgcttccgtatccgtcatcctttgtactcataaacggcaggctcatgggaagctgcctgtcaatcacgttctttagtattcccggcacactaaaatagtacagaggaaacgaccacacaacaatatccgcttcaagcattttcccaataacagtctgcatatcgtcatttatgcagcacacccccggtgtcttctgccagcatgcaaagcagcccttacacgctcctacattcattgaggctacatgcatttcatcaatggatatagcttcatttttgctcttatatccttctttgaagccttctataaagctgtttgcaagccttaacgaattgcttcgtttgccttttggacttccgttaatcagaagtatgttcatgctttatgccctcctgtaagtatatagttaattttagtatagcggctcatatatacatcgtatctgtgcttcgttctctattcatatcacatatacttgtatttctaataccaattatataacatatagtgcctacaatctatactctcggcgcgaaatgtagtttttatggtgtgaaatgcatgttggcagtaaaaaaaagggaaagtattaaatactttccctttcaaaatcttatatatagacttttaaattagaacctttgtctattttgcctgctctgcgatagcagcctgtgctgcagcaagacgagcgattggtacacggaatggtgaacatgaaacatagtcaagtccaatcttgtggcagaactcaactgatgaaggatctccaccgtgctctccacagataccaacgtgaaggttaggattaactggctttccaagcttaatagctgtctccattaatttaccaacacctgtctggtcaagcttagcaaatggatcgttctcgaaaatcttgttgtcatagtaagcgttaaggaacttacctgcatcatcacgagagaatccgaatgtcatctgtgtaaggtcgtttgtaccgaagcagaagaaatcagcctctgtagcgatctcatcagctgtaagagcagctcttgggatctcgatcattgtaccaacatggtacttgatgtcagcatttgcagcagcaatctcagcgtcagctgtctcaactacaatcttcttaacgaacttaagctctttgatctcacatactaatgggatcatgatctcaggctcgatatcccagtctggatgagctttctttacattgatagctgcacggataacagcctttgtctgcatcttagcaatctcaggatatgtaactgcaagacggcatcctctatgacccatcattgggttgaactcatggagtgactcacagatagctttgatttcctctactgacttattcttagcctttgcaagcttctcgatgtcagcctcctctgtaggaacgaactcatgaagaggtggatcaaggaaacgaattgttactgggcatccctcaagagcctcgtataatttctcgaaatctccctgctgatatggaagaatcttgttaagagctgtctctctctcctctactgtatcagagcagatcatctcacggaatgcagcgattctctctggatcgaagaacatatgctctgtacggcaaagtccgattccctctgcaccaagctcacgagccttcttagcatctgcaggagtatctgcatttgtacgaaccttaagtcttctgaactcatcagcccatgccataacacgtccgaactcaccggcgattgaagcatcaactgttgggatgattccagcgtagatgttacctgttgtaccatcgatagaaatctcagatccctctgtgaatgtctgtcctgcaagtgtgaacttcttgttctcctcgtccatattgatatcaccacaaccagatacacagcatgttcccataccacgtgcaactacggctgcgtgagatgtcataccaccacgaactgtaaggataccctgagcagccttcattcctgtgatgtcctctggagatgtctcaagacgtacaagtacgactttctctcctctttcagcccatgcctcagcatcatcagctgtgaatacaaccttaccacaagcagctcccggagatgctccaagaccctttccaagtggagttgcagccttaagtgcagcagcatcgaactgtggatgtaataatgtatcaaggttacgagggtcgatcattgcaacagcctcagctggtgtcttatgtccctcatctactaaatcgcaagcgatcttaagagcagctggagctgttctcttaccattacggcactgaagcatatagagcttcttgttctcaactgtgaactccatatcctgcatatcatggtagtgattctcaagagtctcacaaacattaaggaaatcagcgtatgcctctgggaactcctgctccatctgagcgattggcattggagtacgaacaccggcaacaacgtcctcaccctgtgcattgataaggaactcacccataagcttgttctcaccagttgcaggatcacgtgtgaatgcaacacctgtacctgactcgttatttaagttaccgaataccataggcattacgttaacagctgttccccatgaataagggatatcgttatctcttctataaacatttgcacgtgggttgtcccatgaacggaatacagcctcgatagcaagctttaactgctctacaggatctgaagggaagtctgttcctaactgattcttgtactcagccttgaactgctctgctaactctttaaggtcagctgctgtaaggtctacgtcaaatttaacacctctgtcctctttcatcttgtcgatgagctgctcgaagtatttctttcctacttccataacaacgtctgagaacatctggatgaaacgtctgtatgaatcatatacgaaacgctcgaatgctggatctgggttaccagcgatcatagctgcaacaacatcatcattaagaccaaggttaaggattgtatccatcatacccggcattgaagctctggcacctgaacgaacagatacgagaagaggattcttaaggtcaccgaatttctttccgttaacctcttccatccattttacaccttccatagtctgagccataatctcatcattgatcttacgtccatcctcgtagtactgtgtacaagcctcagtagtgattgtgaagccctgtggtacaggaagtccaatctctgtcatctcagcgaggttagcacccttaccaccgagaagattacgcatggtcatgttaccctctttgaaggtatatacccacttgtttgccattttgcaattcctcctaaattttatttctggtatggtaaaaaaccatccatatacttgattaatgtgtgcactcatgtaagtgcacacattaataataccataatttcagcaaatatcaactaatttttattatcttttcccttatgtttcatactatttttttgaacacggacagacctaactgctcctgctccattggctccacctaaaagcatttccagtagttcacttctgcttaatttttttatttttaactttaaaactcaaatttctttgcaaaataagcatcaagctcatcaattgcgatacgctcctgctccattgtgtcacggtcacgtactgttacgcaatggtcttcctctgagtcgaaatcatatgtcacgcagaatggtgttccgatttcatcctgacgacgatatctctttccgattgttcctctgtcgtcatactcacaattgtatgtctttgaaagctgtgcaaataccttttcagcactctcattgagcttctttgacagcggaagcactccaatctttacaggtgcaagtgcaggatggaaatggaatactgttcttacatccggcttctccggtgtaccgatatcctcctcatcataagctgcacaaaggaaagcgagtactacacggtcagcaccaagtgacggctcgataacgtatggcagatatttctcattcttctggtcatcgaagtatgtaagatcctgtcctgaaacttcctgatgacgtccgaggtcataatctgtacgatcagcaatgccccaaagctcgccccatccgaatgggaataagaactcgatatctgtagttccctttgagtagaaggctaactctgcaggatcatggtcacgcagtctcatctcatcctccttgattccaagggaaatgagccagtcacggcagaagcctctccaatacttaaaccactcaagatctgttccaggctcgcagaagaactcaagctccatctgctcgaactcacgtgttctgaaggtgaagttaccaggtgtaatctcgttacggaatgacttaccaacctgtccgataccgaatggaatctttttacgtgatgtacgctgtacatttttaaagtttacaaagataccctgtgcggtctccggacgaagatatactgtattcttagcatcctctgtaacaccctggaatgtcttgaacatgaggttgaactgtctgatatctgtgaaattgtgcttgccgcatgatggacatggaacattgtgctccttgatgaaatctaccatctgctcgtttgtccagccatcaactgatgtctcaagctcaataccattgtcctgcgcaaaatcctcgatgattttgtcggctctgaatcgctcgtggcactccttacaatccataagcggatctgagaagccgccgagatgtcctgatgcaacccatgtctgaggattcatgaggatggcgcagtccacacctacgttataaggattctcctggataaatttcttccaccatgctctttttacgttgtttttaagctctacgcccaggtttccataatcccatgtatttgcaagacctccgtaaatttctgagcccggatatacaaatcctcttgcttttgctacctgtacgattttgtccatggtcttttccataattcttgtttcctctctatcttacttatgatttatttgtattcgtaactgtccagtaccttcacagctgtaagctgcaggcgcattagaatcagctgtactgaatagttacttgtattcttaattaaataacaattcacgccttaatctacttatatataacatatgtgatatatgacaccggcgctgaattgtcctcctcactgtcaaagtcaaatgtgacctcgttgtcttgcttgaccgagtttaatatatcatcatcactgacactaccatccgctccgttttccgttccttccgtcgcatcggcttttactgcttctgtgctctctgtggcactctctgtccctgtggtttgtgatgcaagcaggctgtacttgtcaccaatcgcaactgttttgtcatctacaagctttactttgtcgacagatgcatataatattttccctttcacgtgcaaatttgagctgccttcgtaaacaacgaccttgtagccggtttcatccagaaactcagatgattcacatttctttgccttgccatcatctatcgctgcgaaatcggtcttgaaatcatatccggctgccagagcctccgcaatcgttcctgaaaaaagctttgtcccattgaaatcagtgtattcatcggttgatgcatagctcatggtaagagatgccttctttttctcgacagtcagctttttgagcttgatcgaaccgtcattcttcttattgtagtcgtctattgacttgtccacatagctttgtaagtcatcctgcttgtatgcagctgtatcaaagtcctcgacatctgtagataccacactgccgttttttgcaacaaacaccgtgctgtccttggtataataatctgtaccgcacccggcaagcaaaccgcatgtcgcaataacaggcaacagcattgatagctttttattcatagctgcctcctaaaatataatctatgatattatacccttttgtatatatgatttcaagtatcatattttaaagggcaacgacatgcatagtatccattaattatttcatgatttaatttcatgctttaatttattacagaaaagctgctgatttaaaatcatgatgcacatagattgaaagatattccttcattatgcttctcagctcctcaagcacatcgtctgacactgcaaacgtgtacagcttcgtgatatcagctgaaacaatatactgcatggtatagagtgtatcgcttagtatatgcctgccctgcacctgcgtgccacagttgtcgcaaaacacccctccgcgtcttgccgaaaagacattaagtccttcctttgaatgacagtgtatacacgaaaacagcgatggaccctcgccatttatcgtaatagccttaagctcaaaaacagccctgaccagctcatttttatatgccggtgattcaagagcccggagtgattgataaaggagctttaacatatccttctcgtcattgttctcctgacaaaaatatccgcagaactccagaaagtaaaacccggtgtatactgcttccaaatcctgtgtcagctccctgaaatagttgctgattgtgacctttgaaagagaatatgcgcttttaccctcaaacagctcaaactcaccgaacgaaaatggattgcttcctgccataagctggctgtttggacgtcttgcgccccttgcaaaggctgtgattttccctcgttcctttgtgagaatcgttattcttttatcaaaatcccctaccggcatggctgaaagcaccataccggtcaacactacactctgtgacatcttaatcttactttcaaaatactattcttcctctttgtatccaaagttcttgatgaggaagtcgctgtctctccaatccttctttaccttgacccatagcttcagattcaccttacagtcaagcagtctttccatctcatagcgcgcattggtgccgatttttttgagcatgctgccctgctttcctataatgattcccttatgggagtctcgctcgcagacaattgtggcatccatatctataatagaaccactctttgtctttcttgtcttcatgcggtcaattcctactgcaatgccatgcggcacctcgtcatttagagcatggagcgctttttccctgataatctcagcacagattgcacgctccggctgatctgtgatggtgtcctcatcatagaactgtgggccataaggcaaatacttaaatatagaattaataacatcatccgtattctgccctcttaaggctgacgtaggaataatctctgcaaagtcgtataccttgcggtaggtgtctatatactcaagcaccttttccttttccactgtatctaccttgttgataatcaatataacaggtgtattaacctttttgagctgctctatgatatgctgctctcctgccccgataaagttggtcggctccacaagccacagcacaacatccacctcatttagtgtcttttctgctacattgaccatgtactcgcccagcttgtttttggccttgtgtatgcccggagtatcaaggaacactatctgtcccttttccatatccgtgtatactgtctggatgcggtttcttgtggtctgaggcttgtttgatgtgatggcaattttctgaccgataagcctgttcatcagtgttgacttgcccacgtttggtctaccgattattgtaacaaaacccgatttgaaattctgtatcatttttcctcctatgtgaatctgtatttatataagcttttcaacattctcaaagagccctgccgactctttaatcatattttcattgccgatgacacatatactgtccttcttaagtactgcctctacaaggtctgcaagccttctgatatcctccggctgtgcatttagtatctcatttctctccttttgaatctgctcgtaagtaataccctcgagatatgcagacagtgatctgcttccctttgcttccggattcataggcgtatcaagtgcactgaaggtaccgataatatacttggtcatatccctctcatcaggcgaaaatctctttatatactcaggtatcctgtcatagacatcaagtgtgtctgaaaggttagggtctctatatgagacaaagtagctctctccgcttctaaggaatgtattcatgcagccgtaagcaccaccctttaccctgacatttatccagagataatcatagcttaagatgatacgcagcagtctaagtgccccggtgtattcatagccctcgcagatgaaatcacctgtttttgccacatactgtatctgggatgcatcaataaatgcttcctttgctgtattaaaatgaacctctgcctgattgcctacagcactcattttattaaatccagctataactttttccagtgaaggctttgcattgccatatgcctcgttatttccggtaaagctgataagcattctgtttcttgcaaacagctttttggctattgcagcaagcttatctgacacactctttggtgactctgaaagctccttttctatgcggcatatagagcggtaaaaagcaactccctttaactcgtcctgataaagcgcgtagcgcgagaagctcgacatacttcgcatagctgcaaccaaatgacctgaactgctaaggttagcctgaagccttgccttaatctgcgctacaagctcacccagtctctttgtatctgtaaaatccgatgtaagaagcatctgctccataagctcaagtgccttgtcaagatttttctccaataccttaagcttcacttcaaacttaaacacgaaattatttctatccttaatatccgggtgacttgcagtacctgtgctgattccgccggtatatatgttggtagcattggctaaatcagtatagctgtacttttcggtgctcaccagcccgagtgcgtttgtaaagaagccaagatagccaagctcactctgggcaaaatcacctgcatcaaataaaaatgatatataatcaatgccgtttgactctatgtcatgacgcacaacctttacatccaaaagctcatcctcaatgtttgaaaaaggcatagcattctttttcatatctgctcttgtaagcattggaagcttgcgcaggtcctcatccgacgaaggctcctcctgatatttctttaaatgctctgtatcctcaatcagcttcttaatctcttcatctgaaagagatgccttgtaatcggaaagctcctttgccaaagcctcctccctctcattgccaagtccacgcttcggctttactgtgacagatgaaccatgggtattgtcaagcagatactcctgtataagcttttcaaaataatcggtatctacagcctttcgaagcttagcaaaggtaccaagacactccagatgtataaaaggcttcatatcatcaaacagccagctgtctaaacagtttaatccaaaaaggagtcccttaggaaactgtccgaagtcagcctccctgaatttgaactcgctgctgttgattcccgcgaggagtgcttctttattaattcctgttttaacaacttctttaagagtgctttctataatgctttcaaactcatctgcctgagatgcattggcattctttgccacaaacgagaataccggctgcaaaatgcccgcatcatatgagccatacacatcatcaccgattcccgcatctatcaatgcctgcttcaccggtgctcccggtgagctgacaagtgcatagtcaagcacatcaaatgcctgatagagcatctcatcaagcgaatcccctaccacacggttataagatagataagtcttattctcctgtgaatcatccatggtaattgaatactgtgcctcaacattctttatttcatcaaatgcaggctgtttattaatttctgaattaacttttttataatcatacaggctcagatattccttatccagccactcaagtctctcgacaacatccatatcaccatacagataaatgtatgaattggatggatgataatacttatgatagaagtccagatatgcttcatacgtaagcttaggaatatactccggattaccgccagaatccttgctgtaggtattgtccggaaacagtgagcggtaaatctggcttgaaagcacctcatccggcgatgagtatgctcccttcatctcattgtacaccactccatttatcttaagctcgtcatccttgcctgtaagctcgtagtgccagccctcctgcttgaaaatctcctcgtactttgtgatattcggattaaacactgcatccagatacacatccatgagattcttaaaatcctgatcattgcagctggcaacaggataaactgtcttgtcagggtatgtcatggcatttaaaaatgtattgagtgagccctttgccagctcaataaaaggatcctttacagggaacttctttgaaccgcagagtgtggtatgctcaataatatgcggtacacccgtctcatcctccggcggagtcctgaagcctatataaaagaccttattatcatcattatttgataaaatggcaatccttgcaccactttttttgtgtctcagaatgaatccatccgactggacatcctccactctgtgctcatctaaaatctcgtattcagccaaatcgtgaattgtcatcaattattcctcctaaaatgcgatgatgatagtataccacatttttacatattatagttaaattataagtatatttaccacaaaaaatctgttaaagtaatattctgcaacatccggctttaaaagtcagagtctatgctcctcttctgaatattaacatccatctgtggaaacggaatttcgatgttatttttatcaaatgctgttttaatttcttctgtaagctgccattttgtgttccagtaatcctcgttcttcacccagattctcgcaccgagctctattgccgaatcctgcagctcactcacaaacacattgctcggctcatcgtgaagcatcgtatctgctgatgtaacaacagattgcagcacactctttgcaaatgctaaatctgtgctgtaggatactgttactctcaaatcaagcatcctcttatccatcatagatacatttgtgatacacgaatcagcgagctttccgtttggtatcataaccatcttgttatctattgtcaaaagccttgtataaaacagatttatatcctttacagtgccctctgtaccacttgaaccgtcaactatgtaatcgcccacgccaaacggcttcatcaaaagaataagcacgcctcctgcgaaattcgacagactgccctgcaatgccatacctacagtaagtccggcagagccaagaaccgctataacagagcctgtcgccactccaaagcccgaaagcagcgccatgacaagaataaaatacaaaaaatatttaatcatatttgcaagaaatgatgccactgcagcgtccattctgcttttatcaaatccttttttaattattttcacaattgatttaatcactttaataccaataagcagtatcacaatcgcaacaacaagctgcacgagaaagctgataagcgatggcatatatttctccagatacgtctttacaatgcccgggttttcaataacctgctgtacctcagtgtttgcaaccggcactgatacttcaccaagaatttgtctgatcatataatctcctatatatctcttatatattttctatatttgttatttccttataacccactaaatcccccatataaaatatgggggatcagtatttaaatcaaatattaattcactatttaataactctcactctgagcactccgtcaatggcagaaagcttctcaacggtagaagcatcaatagctgaatcaagatcaagaagtgaatatgcatagtcacccttgcccttgtttgtcagatcagatacattgatatcagcctctgcaagagctgttgtaatctgtccaatcatacccttaacattcttgtgaaggattccgactctgcctgaagctgtgcatgcacccatgctgcagtcagggaagtttactgaatgaacgatattaccattctctaagtaatctctcaactccttgacagccataactgcacaattgtcctctgactctgctgtagatgctccaagatgaggtgttacgatgcagccctttgctccaacagttgtgttgttagggaaatctgaaacgtacttcttaacctttcccttggcaagtgcatctaccatagcctcttcgtcaacgagaagatctctggcaaaatttaatacgatagcggttggcttcatcattgcaatagcatcagcgtttaccatcttctttgttgaatcaagaagaggtacatggattgtgatgaaatcacagttcttgtagatgtcctcaacattgctgatatgcttaacgcttcttgaaaggttccatgcagcatttactgagatgtatggatcatatccgtaaacatccatgcccatatgtactgcagcatttgcaacaagtacaccgatggctccaagtccgataacaccgagcttcttgcctgaaatctctgttcctgcaaagttctttttctgcttctcggctgtcttcgcaatattctcatcgttctggtttgcaagacaccagtcgatacctccaacgatatctcttgatgcataaagcattccggcaaacacaagctccttaacaccatttgcattggctcccggtgtgttgaatacaacgattccctgctcggcacacttgtcaagcggaatattgtttactcctgctcctgctcttgccacagcaagcaccttgtcaccaagctccatgtcatgcatagcggcacttcttacaagtgctgcatctgcatccttaatatcatcaacctttttataatcgtcagagaacaggtcaaggcctactcctgcgattgggtttaagcatgtgtaattaaacattatgcattctcctcctcaaacttcttcataaactctacaagcttctcaacgccctcttttggcatagcattgtagatagatgctctcattccgccaactgtacggtgtcccttaaggtttacaaatccggctgcagttgcctcctttacaaacttggcatcaagctctgcatctcctgttacaaacggaacattcatgagtgatctgtcctcttttcttactgttcccttaaagagcttgctctgatcaaggaaatcgtagagaatcttggccttctcctcatttctctccttcataactgaaagaccgcccatcttcttgagccatttgaataccttgccacagatatagatgccgtagcatggtggtgtattgtaaagagaatcattatcggcctgagtcttccacttgagcatggttggtgtgcccggtagacaatcatctgtgataaggtcctctctgataattgctataactactccggcaggtcctacattcttctgtactccgccatagataacagcatattttgatacatctacaggctctgataagaagcatgaagatacatcagctacaaggttctttccctttgtgtttggaagcttcttgtactttgttccgtagatagtattgttctcgcaaatgtatacataatccatatcatctgtgattggtaaatctgagcagtcaggtatgtatgagaaggtctcatctgcagacgaagcaagctctacggcgtctccgtaaatcttagcctcggcaaacgcctttttagcccactgacctgtgataatgtatcctgcttttttatttttcataaggttcatcggtacctcagcgaagaactgtgaagcaccaccctgaaggaaaagcaccttgtaattgtcaggtatattcataagctcgcggagatctttctcggcatccttgatgatgtcatcaaaccatttagatctgtggctcatctccataaccgacattccgcttcccttataatccatcatctctgctgctgcttcctgcaatacctcctcaggtaaaactgcaggtcctgctgaaaaattgtaaactctactcactctaatttcctccttgtgtcgcattgtagtcctcttcatcgaaagactcgttgataggcttgcccggtgcaaccataggccataccttgtcatctgaatcaatgatacaatcgatgacaaacggtgtcttgctctttaaggcatctgcaaatgctttttcaaattcttcctgggtcttaacacgtcgtgcggtggctcccattgcctctgaaagctttacataatccaccccatcatcgagtacggttgccgagtaatgcttctcataaaaaagagtctgccactggcgtaccattccaagtacatggttgtttattataacctcgataagaggaagcttttctcttgaagctgttgcaagctcgttcatgttcattctgaagcatccgtcacctgcaatattgactacagtcctgtcaggattagctgtctgggcaccgattgcagcaccgagaccgtatcccatggtaccaagacctcctgatgtaagaagagttctcggcttactgtatttgtaatactgggctgcccacatctgatgctgaccgacctcagtaaccattatagcatttccttttgtcatttcatagattttttcaataacaaatggtccgctaagtccctctttgtgatatgtaagaggaaaagtctttgcatatgcaagcacatgctcaacccatgaattgtggtcaagctgtgtaagctttttgttaatgcgtgtaagtatttccttcacatcgcctataacactcgatgtaacacggatatttttattaatctctgctgcgtctacatcaaactgtaatatcttggcctggtctgcaaactttttaggattgccaagcactctgtccgaaaaacgtgtaccaatcgcaatcaaaaggtcgcactctgaaactccaaggtttgaggtctttgtgccatgcataccaagcatgcctgtgtagttatcacttgtgccatcatatgcacccttgcccatgagcgtatcgcaaacaggtgcattcaccttgtctacaaattccttaagctctttgcttgctccggagagaaccactccgcctcctacaaatatatatggctttttggatgcttttatgagttcaattgcattatcaatgtcactgtctgtaattgtttctgtctcacgctcaggaagcttgatttcctgcctggtgtactctaccagatctgccgtaacattctttggaatatccacaagtacaggacccggtctgccttttcttgctatattgaaagctcttcgtattgtatctgcaagcttctctacatcctttacaataaagctgtatttggttacaggcgttgtaattccggcaatatctatctcctgaaaactatcctttccaagtaacgagactccgacattacatgtgattgcgacgattggaatcgaatccatgtatgctgtcgaaattcctgtgaccagatttgtcgcacccggtccgctagtagccagacagacgccaacctttccggtgcttctagcatagccgtcggccgcatggcttgctccctgctcgtgtgaggtcagcacatgcttaatctccggatgcttgtagagctcgtcatagacattaaggatggctccccccggataaccgaatactgtgtcaacaccctgttcttttaagcattctataataacctgtgatcctgttaactgcatcttgtattcctctttttcttatacgaatcctttacgataatagataaaagccttattcgtactgaattttctatcaaaatatatactacgcgttctgctcgcccggaagtgcaaggatggctcctctgtttcctgatgtaacaagcgctgcgtatctcttcaaatagcctgttgtaaccttcggctcccttggctgccactttgccttacgctcagcaagcacctcgtctgacacatcgagctcaagcttcatgtttggaatatcaatctttatgatatctccctcttcaaccagggcaatcggtccgcctactgctgcctcaggtgaaacatgacctattgaagctcctcttgaagctcctgaaaaacgtccgtctgtgatgagtgctacagagcttccaagtcccattccggcaatagctgatgtagggttaagcatctctctcattccagggccgccctttggtccctcgtatctgatgacaaccacatcaccctctacgatcttgccgccctttattgctgcaattgcatcctcctcgcagtcaaatactcttgcagggccttcatgaaccatcatctcatcgacaactgctgaacgttttactacagagccgtccggagccagatttcctttaagcactgcaagtcctccggtctttgaatatggattgtctaccggtctgatgacctcagggtctctattgactgcattctttatattctctccaactgtctttcctgtaacagtcatacagtctgtatttaaaagtccgatatcagcaagctctttcatgacagcccacacaccgccggcctcatttaagtcctccatatatgtagggcctgccggggcaaggtggcagagatttggtgtcctctcactgattggatttgcaaagctgatatcaaaatcaaagcctatctcatgagcgatagccggaagatgaagcatagagtttgtagagcagccgagtgccatatcaactgtgagtgcgttcattattgcatccttcgtgatgatatctctcgccttgatgcccttgttgtacatatccataacagccattcctgcatgctttgcaagacggatacgctctgaatatacagcaggtattgttccgtttccgcgaagtcccataccgagtgcctctgtaagacagttcatagagttggctgtgtacattcccgagcatgaaccgcaggtaggacataccttgttctcatactcacatacatcatcctcagtcatagtaccagcagcgtatgagccgacagcctcaaacatagatgaaagacttctctttctgccctttacgtggcctgcgagcattggtccgcctgatacaaatactgtaggcagattaagacgtgcagccgccatcagaagtcccggcacgttcttgtcacagtttggaaccattacaagtgcatcaaactgatgagcgattgccatacactctgtagaatcagcaatcagatctcttgtgacaagggaatatttcatacccacatgtcccattgcaataccatcgcagactgcgattgcaggaaatactacaggcactcctcctgcctctgcaactccaagctttacagcctcaacgattttgtctatattcatatggcccggaacaatctcattgaatgagcttacgattccgaccataggctttttcatttcctccggtgtaaaaccaagagcattaaataaacttcttgccggtgcctgctgcattccggctcttgcgttatcacttatcatattttgtctccttatttatctccgactatttctttgagtgcttcatcattactactgtatactcaacgatctgcttatctataacctgttagctgtctattataagtcatgcagctacacacgttctgcgatgagatcccccatctgtgctgtgcctacctgtgtgataccctctgtagtctcacccggctgtggcatgatgtcgattgtcctgtagccctccttaagcacctgctttacagcatcctcgattgcctgtgcttccttgtccagatcaaatgaatagcgaagcatcatggctgctgaaaggattgttgcgatagggtttgcaatgccctttcctgcgatatcaggagcagatccgccacttggctcgtaaagtccgaactttgtatcgttaaggcttgctgatgaaagcataccgattgagcctgtcaccatacttgcttcatctgataaaatatcgccaaacatattctctgtgaggataacatcaaactgcttaggatcctttacaagctgcattgcacagttatcaacaagcatatgctcgtatgtaacctccggataatccttagcgacctcctcgacgatctttctccataatctggaagaatcaagcacatttgccttgtctacggatgtgacctttttccttctcttcatggctatatcaaagcctcgctttgcgattcttctgatttcattctcattgtatgtcagtgtatctgtggccgtaacaactccgtccacctcttttgtctctctggctccgaagtaaagacctcctgtaagctcacgcataatcatcatatcaaagccgtctccgatgatatcgctacggagcggacatgctgcagcaagctccttgtacaggtatgccggtctaagatttgcaaacagattgagcgactttctaagctttaaaagtcctgcctccggacgaagctcaggggccagcttgtaccatggtgatgtggctgtgttgccaccgatagaacccatcagcaccgcatctgaatcaagcgcagtcgcaatagcctcatctgtaagaggaacacctgtagcatcaattgagcagccacccataagaatgtctgtgtagttgaagctgtgtccatacttgtctgctattttgtccaataccttttttgcctcagtgactatctccggtccgattccgtctcctgaaattacaccaactttatattccataatttcttacctcttttacataaaaatacatattcttatattaaagcattaaagtagttatttcaatatgccgggatattttactttttcatgcaatttataactgtagcttataataactgcatactataataacagttttttattattattgcaagagatgcggataataagaaaaccgccacttatgtgacggctttacaaatctgcattatttagctgaatcctctgctttctcaaggtcagcgatagctgacttctgcattggaatacggcagttcttgttgttaccaaactcaacgattacagtatcgtcctcgatatcgataactgtaccgtaaaatccacttgttgtaagaactgtgtctcctgttgcaacctctttaagcattagctcctttttcttctgctccttcttctgtggacggatcataagaaaatacataactgcgaaaagtactactaaccagacaatcattccaattgttcctgctgcctgaccgtttgctaaaattgatgtcatcaattgttcctcctaaatattctataattgatgtgttttaagcactattaccataatacacgttaaacgtgctaacggcaaggattttttatcattttcgagattttttatatttatctgctagctctgctctccctgtgtcattccatagagcttttcagccttgtatgaggcaaaacggcctgcatcaagtgaatcccttatctcctccatcatgttgttgtagaaatacaaattatggagcacgcacagtctcattccgagcatctcctttgcctttaaaagatgcctgatatatgcacgcgaatatgtgcggcaggcaggacagttacagccctcctcaatagggcgcatatccttctgatacttctggttgaacagattaagcttgccgtgattcgtgtatacatgtccgtgacggccgtttctgcttgggtatacacagtcaaagaaatcgattcctctctctacaccctcaagtatattggcaggagttcctactcccatcaggtatgtaggtttattaacaggcagatgaggcactgtttcatcaagaatatgatacatctcctcatgactctctcctaccgccagtcctccgacagcatatccgtccagctcaagctcagaaatgcgctttgcatggtcaattcttatatcatcataaatagctccctgattgataccgaataaaagctgctccttattgatagtatccggtaagctgtttaagcgtgccatctcctttttgcacctctcaagccagcgcgcggtcctgtttacagagtttgtcacatactgtctgtctgcaacgctagatgggcactcgtcaaatgccatagctatcgtggagccgaggtttgactgtatctgcatgctctcctcaggtcccataaaaatcttggcaccgtcaatatgcgagttgaagtacacgccctcctcctttattttgcgaagacctgccagtgaaaacacctggaatccgccggaatctgtaaggattggtctgtcccacaccatgaatttgtgcagtccgccaagctctttaattattttgtctccggttcttacatgcaggtgatatgtatttgacagctcaacctgacactttatctcctttaaatcgtccgtagagacagcaccctttatcgcacctactgttcctacattcataaatacaggtgtctgtatatctccatgcacagtatggaatgtacctctcttggcacgtccctcttgttttagtaactcatatttagccatattttcgtttaattctcctgtttcttttacttatcgccattgcctacgatttttctgattaatattccgttggtcagcagtgtggtatctatgcaatgcctctcaaaaagtacctcgccgtcctttggcacctcaatatcctcatcagagcagttaactataacctccacatatgtatccacccagcccatctttctgaactggattacccttggattgtcagcaaaatcgtcaggaaaatggaagtttctgccctttaaaagcggctcactcgcccttaaatgaatgagctttgataccatctcaatgcgctccttaaacctgcctgcctcaatatcatcccacggcatacatcgtctgcaatcagggtcataactgcccggcatagcaatctcagtgccgtaatatatacatgggctgcccggcatggcaaaaagcactgcaagctgtgcaaagtactggtcgagattctttgtatcagagcgaaggcgctttgtatcatgtgaatcaagcagattaaaaagcacatcattggtctgctgcatgtagttggtataacatctgtttatagtatactcaaaatcctgattcgtctggctcttatctatccagaaatcctttatgctctctccaagcggatagttcataaccgcatcgaactcatctccacgcaaccacggaagagcattatgccatatttctcccaaaatgtaaatatccggattgatttccttaagccttgccctaagctccttgcagaagcggtgtgacacctcatttgccacatcaaggcgcagtccgtctatatgataattttctacccagttggcacagatatcgataaagtattttcgcaccgccggattatttgtattgagctttggcatattgtcaaaaaatccaaacgtataaaactgaccctttttagccgctccatgcttaaagtcaagaggccattcattgatcataaaccagtcataatactctgaatccgctccctttgctaaaacatcctgccacggtgcaaaataatagccacagtggttgaacactccgtcaagcattattctcatatcacgcttatgtgcttctcctacaagctgcttaaaggtatcttcatctccaaagcgcgggtcaatctttgcataatccgttgtatcatacttatgattgctcggtgactcgtttatcggtgtcaggtagattccgtttattccaagctcctttaagtaatcaagcttttgaatgattcctgcgaggtctccgccgaagcattcctcatttttgacctttcccctgtttctccacggaacaacataatcaggatctatcgagtggtctccattgcagaatctatccggaaatatctgataccatatagtgtcatttacccacttcggtgtgaccggaatatcacacggattcatccatgggaacacaaagcactggcggctcctgccctcaagtgccatctgctctgcactcacgaagccatcctcaaagtaaaaccatctctcatcctctgtgatgagctcaaaataatatttaagtctcttgaatggcggctttaccgtggttgtccaccatatctggtgctttaatttctttttaaatattatcggctgcttatcgccattccatgtctccccaccgcctaagataccggctgcgaatgggtcaccgagtatgatatttacttccttcacatcataaccggtctttatatttatgattaattcatcctcatttaaaggatagcagtagttgtcgtatgcctggtgaaataccccgttaaattccatgttttctccctcttttgctgtcttattgtagtcgttattgcattgcttcattgtggttctgaggacggcatgtaagcatgcatcgatgataccttttgaccctttaatcacataattatatacaaacatagttcgaaagttatctaaataaaataatatcatagttttcttgactattcaacttgctattaattataatgtatttattatcgtaactattcgagtcacattgaaaacaaaaaatgctgtttacatgcaagcatgatttatcattttttgttctcagaggtttaaatagttacccattattataataaggagaccatcatggcaggttcatcatacggaaatatttttagggtaacaacatggggagaatcacacggaaagggcttaggggtcgttgtggacggcgttcctgcgggacttgagctgtgtgaggaggatattcagatattcttaaacagaagaaagccgggacagtccaagttcactaccccacgcaaggaggatgatgcggttgagattctctccggtgtgtttgagggaaagactacaggtacacctgtttctatggttgtgtggaataaaaatcagaaatcaaaggattacagtgagattgcttcgtactatcgtccggggcatgctgacttttgctttgatgagaaatacggcttcagagattacagaggcggaggtcgttcttcgggacgcgagacaataggccgtgttgcagcaggtgctatcgctgtaaagatgctctctggccttggcataaaatttcttacatacaccagatcaataggtcctgttacaattaatgaggttaattttgatgcccatgagatttacaacaattcactttatatgcctgatgctgatgcagcgctaaaagcttctgaatatctggaggaatgccttaaatcactcaattcctcaggcggtgtgtgtgaatgtgtcatcacaggtcttcctgtcgggctcggtgatcctgtattcgagaaaattgatgccaatctggcaaaagctattatgtctatcggagctgtaaagggcttcgaaatcggcgatggctttgatgcagcaactgctacaggacttacaaacaatgatgcctttattatgagggatggcgctgtttcaaaagagacaaatcactccggtggtactctcggcggcatgacagacggctcaccgcttattttcagagctgccataaagcctactccttcaatcgcagctacacagcacaccgtaaataaatccggtgaagatatagagatttccatcaagggacgtcatgacccgattatcgtgccacgtgctgttgttgttgttgaagctatggctgcaattactattgcggatgcactgcttatgaatatgggggcacgcatggaccgcatcacagatttttataaaaaattataactttgtcctatattaaaaagcatctatcctgatttttccgaatagatgcttttaatttatttcattggaacaatctgtaatgtttttcctagtgaattcaaaatatattttaaaatatatttccaatgagcagcggattaaacagaaaatactgcgcattcgtcaccccaaaagccacaagcgccagtggcagcacaataaaaaggacgcatgatataatcacagacatgccgcttcttaagtatttaaacattgcaaaaacaaacaggctgaccagtaatccccctataaagcgcatcagcattatgataagtatatactgccctaccgatatattctgcgaaacacgccacagatgctccatacttgccgccgaagcattaagcccctgcgtgccatatgccgaaagcacattgcacagccgcacaatatatacaagtgcaaatgctgtgacagtgcccaaaaagccaagtatgcatttgattcccatatgctgcttcctgccacggcgggtagtccttaaaagccggatttcatggtttgcataatccgctccgcatataccgcaggctattgctattaggagaataacatacacaaaggcctgtgctgtatcacggtttttgaagtctgttctgtcggtaaggatatcatagcccttttcaaaaaacagccagccctcttttaacgtcttaagataatccacatgtgctgtaagcttgttgaatgcctcctgtctgctcagttcatccttgtactttatattgatatagctttcactcttcccctgtgccatatcgtaagcaatgttatctgacagtctgtcgtattttactctttcttcatccagaagctcattggttttggcagttaaaggtccataatatttgtccatatattccttgtaatacacctcatcaaccgagtcataggaaagcttctctgccggattccaccataccacaaaaagagctgctgcaatcaaaataagtaacacttttcccggaacaagtgccttatagcattcgtgcaaaaataaagatgtatgacagcctgtatttttgccgcaggcaaagccgggcaatataagctgctttttttcatgcaccgaattgagataatttgtaaccgcaaaaatacatacagctatacacacaagccagaacaagccatacaataccccggtattaagcggatatccaaacagattgatattgacataatcagaaaaaagtctgcctgtcctgactccgtacatgatatttatgtacttaaggaaggctaggaagctggttcctgatatcgttgtgtagcagatagcctcaataaccacggtcactgcagaagcaacgaacacaaatataatattgtcaagcgctgcgcatatcagcataaaaaacatgccaagcaatataaagcttattattttcacaggaaaatagcatgccagaaattgtcctatactaagcttaaacggactgccatagtacagataaacactttgaagcggacttttcagatttatcggattgtaaaagcacatgcttatgactgcattaattccatacaacagcaaggtgataagaatgaccgccataatcatcacaaatgactttgatgccataagctgccttctgccccttgcagttgttctaagcaatgcaagctggttctcgcttttttcataaaacacaatattgagtgcaatgataaaaagcataatcacagccacatagtcggtaagctcattgtctgtaatattcaaaagtcccgatgcatcaataacctcaggcactgtacctttaagcttactgtagactctgctcgttttagcagcatttttctctgcgaagcctccattgccggaaaacttattcataatcgaaatctcgtcagccttttcattgacagagtcgagatactcatcataagaaagacatgctcctacttccttgtataccctgctgcacagactaattctgccgtaagcttctgccgtcatctgcctctgttcaatttccggcaaaacatcctcacgactgtaattgcttatttcgccatacagcgcgctgtagtccttatctgtatacccatcatcatttacggtattcatggtatacagtccaagaacaggattaagaacaagcaaaaacaaaagaataatcactgttcttttagtcaatagtttacatatttcgttttttactatatccattttcagtccccattaagatacaaatacaagtcctcaagatttggccgcacagcctccttctgccatctgccatcatacgaatcggcaataatgcgggctatgacaccgtctgcatcccttgaaatattgctcaccttgtatccggtgtttacctcatctatctcattatccgataaaaagatattccatacctttccatccagctccttaagcagctttgacggagaaccactccttattattttaccgttgcttaacataactatctctttggcgataaactctacatccgtaaccacatgagtcgcaataataacaatcttgtcctttgcaacctctgatatcagattgcggattctgattctctccttcgggtcaagccctgccgttggctcatccagtataaggatgccgggattgcctatgagtgcctgtgctatcagtgctctctgcttcattccacccgaaaaagcgccaagcttttttccaagaacatcatcaagctttaccatgcgcacatagtgctctatatctttaccggcttcactcttttttaaccctttcagggatgccataaagtaaagaaagcgcctaagactaagctccggatatatattctgctgctgcggcatatatccgagaagcttcctgtattcacttccaagctcgtctatgccccttccgtcaagcagcacacggccttttgatggagtcagattgtcagaaatgagattcatcatagttgatttaccggctccattaggtcccaaaagcccatatatgccgggtgtaaatgaaaaagacacatcatccagcgcagttttatccttataaacttttgtaagcccctccaattcaagtgtcattgcttatattcctcccactgacttctcacgctttcaagatagctgtccattccatctgctgtaagcttttgtacggcaccgtctaaagtatcatctacagtggcaccatgcagtcctgtcatgaaatcatctaaatctgttgaaatactgcccatattcttagtatccggttcgaagccgataaacggagacaatgtggcattgtcataaaagtcaaaaaactccttcttacgattgtccacatatttctcgttctttgtcggataaacattcacgaaaagattaagactaaacttcgtcagatagtcatcatccagactgcctccatcacaagcttctgcaatgccatcttttagcttataatccttatctttttcaccgtacaaaaggatattgccatacttttcatttccatataacagactaaggaaatccatcgcagcagaagcatcctttgctttctttgctacaccgatggagccgtttatccttgatgaaaggtaagtctttacttcctttaccgtgatattgtcctttttgaaattttcatccacgctaccgacacataaagcagccgcaaaattgcctgccttgatattttttaatatctgagcatcattcagccccggattgttgagatatgttatctcatttgtcaaatcatcagacatatagccgtctttcttcatccggtcaagcaccctcagatacccggtaaatttctgtgactctaaaggatttccaacagacatagtatcatagtcgaagcagagcccgtttcttatctcacagccaagcatatcatcaaatctatatccgtttatgagatactcgaaccttggagtatcacttttatcccatttaacaccctgaagtatctgatatattccgtctatgctgccatcccatgcacttatcgcatcgtcagaaacgtaatccctgttgaaggctgcataaactactccctcaccacttgcaagtgctgacggaatcgaataaatatgcttatcgcatttaaccatctcccaaagattctttggaaaagcctcataaagtgtttttcctttatcgcctgataagatatcatcaagattcaggaccagatccgagcgtaccagatcacacaccggattatttccggcagcatcaccgaaacccaggaatgctatatctgttttaccgttttccaaggctccctcaacagcctgtccgtaattgtcataggacaaggttttgatttcgagctcataatcatgtccgtccgcagcaagtgcatcgttgaacttctttagattattcttatcaatcttacaaatatcaggtacagcaaacgttataacatgcgcatctgaatttcttttgttctctgattcttctttatcagctttatccgacttttttgttttatcagccgactctgtccggccttcgctgacagctccggcattatccgtttttctgttaaggcagactgccgccactgctataacaacaatgactgctactgcaaccgctatcaaaataccctttttcttactattcttcatcatcaaaacacctcaattcctttggttcaaatactcccttgttcaattcatcaagacttattaccccaaggcacaactttccgttatcatttgtatatgtgacatataccgactgaccgcatatgcttgcaatgctaaatgccttttcagtagacagcttcatcagttcttcactcttatcatccttcaagcgataatatgtcacttcatcacttttttcttcagaaagggcataatataaaaagtctccgctcttttttaatggtccatattgtgtttttccatccgcatctatcggaagctgtcttgtctgtctgctttcggtgtcaaacacaaaatatccatcctttgacgaataataaccatcgccatctaacagcctaagatcgttaatatggtctatttccgtcagacatgttgtcttttcatctgctatatcatattgatatattccattaagcatattatcataagcaaaagactccgcatcatctgacgctccctcctctatcatcagctctgtaacatcatctccaaaccgcacagtcgaatagtacactgcaccgttttcataatatatgtccgtaatatttgcctgttcgcttgttatcttatcactcatatacaccttgtaattatcgagatctataacaaaaataccggcttcaggcttatcatcatttacaatctgtccttcatcattaagctctattctgttactgtaagctcctataacataattatccctgtacaaaacagccgtaacattctgaacattctctaatttggctgcttttttacgattctcaccgtttgagtccataacatacagatattgaactgtcatatcttcatccgacatatttcctacataataaagatggtcattgtaaagcaccgttccggctccttctaaaccataaaaagctgcaggacatgagggcttctcattggagcccgagaatccttcatgtgtgcagttgggcttatcgcaatagaccatgtccttgcctgatgccgtatcgatgagatgcagtattccggaatcatcaagatacagtacattgtcttctgaataattacatcgtacatctccagagccatatgtgtacattgtattggatgtactgcggtttctattctttattataaaaaccgcagtcacaatacagatgataagtatgaagatgattgatgcgattaatatgcgttttttcttcatagtgcccctccctttttgataatattatacataaaacaaattactccgaatacaaaaggcgaaattagtacttttcaaggtgaatttactaaattttcatcaatatttccacggtgaaccgttcatctgaacactcaaaatccagtgtgcttatatatttatcaagtaccttctttacattctttaatccataaccatgttctcttacagattgttttgtcgtaaccggcaatccccctttaaatatcactttttgtaaacacctgttactaatctcaacaacaagtgaatccattaaataattaatttccaaatctatacttggatttttcacatctttttgtgcctctatcgcattctccaaaaggtttccaaaaataatattcatatcatatgccgataagtttaaattacacggaaccacaacttttacattcaactgaattttcttatccaccgcacgctgaagcatataatttaaaactgtatcaagcgccgtatttcccgaatcaaccagtcgccttgattctacaagattattctccatagctgacacataattttttatctgttctatttcgcctgttgaagcaagcaccgaaatctctgcaaaatgacgtttcatatcatggcgaaacgatcttaatgcctccatgttttcattctgaagcataatctctctttcataagaactaacctgatctctaagtgcctgattttccaaagccttctgagaagacttaacaagatcatccatcagatatgaaataataatattcacaagcagaaatgctccgcacactaacgaaagagaaaatgatgacacggttttatccataaatattactattgatgttataatacatactaataacgacgcaataataaacaaccaataacgattattcagctctatgcctaaatcattttcaaaaaatctttctgtaatcaactgtgtagcatgcaataataaaagagcaaatatacttacaaaagctgaatatccatcatatccaaagggttttattaaaaatgcacttactactaaatctatgatacagcttactgccaaaatataaaaaacaaatatacattttctttttatcgtaccattatatgataaagcaattgctgacagccctaagaaaatactaaggaaattaaatatcggtttatgaaaaaacaagtttacaaatatcgctataaaaacactaaataaatatgcaaatacctttcgcactctgtttccatcattatcaaaaaaagtatgagtaaatctttctgcaataacagtctgagctacctttgtaaacaaaataaccattgctctttcaaaagtcatatcacttccttactccttccatagttaaaaactgcttgcttaaatgaagcccttttagactgtgctatacttatttccataccatttttcagtaaaacagcatcacttttccatgatttaatacattttatattgactatatatgacttgcttatgcagacaaactgaaacggaagatttgatacaatatcactaagttttccataataagatacactttcaccatcggttttacatatagtaatagttttatttctgctggaaaacaacataatttccccatatggaatagaatatcctgtcttattatatgtatatctgaattcttttttctgcacatcttcaagttgtaatattttagtcatggtatcatacaaaacattttcatctatcggttttataaggaaatcatatggatgaatttgaaaaagctccatagcatagcttgttttatgagaaataaacacaatattcatcctgtcattatgaagcgtttcccttatatattttcctgcataaaccccattatcacccggtaactcaatatccagaaaaagtatctgcggattgaattcttttatgtctctgcataatgacatagaatcataccatacttcaacctcgcatttttcagctctattattaaaatattcaataattattttttcgagtacagcgcactgattaatctcgtcatcacatattgccactttataaatcatttgttatttttccttctgttatcttactccaaaattactttttataattttatctaacataatagataaaatcaacaatccatgcacaaaacgaccattttttgcagaaaatggacataaactacggttacatattataacgggataattatagaaaaactaaattcattatcctcatttttaataacatattcgccattgtacttttctacaatttgaataatattttttatgccaatgccatgcatttccggttcatcttttttacttgtttttatttcattaccactgtaaataattgaatgactgcatgtatttttcaccgaaagaactataagattttcctctatcacaaactttagttttatagttttcttttcctcacatttttcacatgcttcaatggcattatttagcagatttgctaaaatcactaccagatcctcatcctctattacaatttttgataaatcatttaccttaaacacaaaaacaatattcttactgatagcctcctgatactttgtattaagaatcgcatttattatcacatgatttgtattgattacatttttttctcctataaaagtattgctgatatttcttacatatttacttgccttgtcatattcatgatctttcaataaggattctatacacaatatatgatttttaaattcatgtgactttttcttctgaatttcataattttccgaaatagaacggtacatatcaatttggtttttaaactgtagtcccaatatttccttttcatgcaatttagcttcacttgttacaatatcgttaatcaggaaatatacaaatatattcatcacagccaatcccaaagagatagaatataaaacattcgcctgcacttcattttttgtatattgaaacgtcataatcattgctataattgtaattattgtaaatacaggaaaaaacaaaaatcttccccatattttgtcaggtaaagtctctgttgatttttttccaaagtgtttttttagcagtaagatacataaaaatacggtaatcttgctaaaaataacaaccaagcttccctctaacgcatatcctttttgtacctcaccagcttttgaaataattgtgttattactaatataagctatataatcaactatgattgataatccttgatataataatgcaaaaatgactgatttttttatactaatttcaaaataaaaactcataattataactgcagccagtacaaccaacgtcattttcaatataagcatatcagacaaaaataatccgcataaataatagcagcaaatcaatgatagcatcagcaaaactttttgactttttcttaatctcgaattttctttgcaaaaaacatcgtaaaataaattacaacatatcgcttcaaatataataattactaaactgaaaaaatatgtaaacatatatcacaattctcccttatatgaaatgaatgcatccttcacattcttatatcttgccttaggtatgagcaattcctgattattacataacagtactttatagcatttaacactcctaatatatttcaaattagtcaaatagctttgatggattctaataaaatggaaatcttttagttcattttccagctcatttaatgtgccatataaattatagattttgattttatcctccatgatatagaattgcagtttatgtaatttgctttcaatatatagtatattgtctatattaatctccttttctccttcattgaacttgaattttttcttttttactaccaaattcatcttatgaagaatggcatccatgcattcgcttatggaagcctccaaattagtattatttttcaacagatatcttatggcatcgaccttgtagccctccaacgaataatttatataggctgtcacaaatacaatatatatttcagaactatattccctgattttttgtgccgtaacaattccatcaacatcatccatattaatatccaaaaaaatgatgttgtattgtttaatttcaattcctaaatcaattatttccttacctgatgaaaatgtatctatttcataagaaatctctttttcgtttaaataggctgcaacatatttatttatattatctctaaatactttttcatcatcacatatagctatttttaacattttttctccattactatcttttgtatttcagttattatttcaacaaattttcaaataatccgtattttttaacgaaaaaatccgcaataccataatttagtatagcggattcattcctaaaaaacaattattttaatctaaagcgatagcctcattctcctgacgtcttaaaatatcaaactcatcaggtgtctctgacagctttacatagaatacctgctgtggatgcgggcaggattccatctcattgccatcctcatcaacgagtgcaagcactgttgcaagcacattgtctccgtttggcttcatgatttcaatctgctcgccaactgagaacttgtttctctgctccatacgatagagacctttttcatttggcgcaccaactattccgagataggtgtagcccttctcgtaagtattgttatcgtatatctgagtctcctccgaaggctttccgtagaaaaagccagtggtaaactgcctgtaggtacagctctttatctgctctaagtaccatggcatatttgcctcgtatttttcaggtgactcaagataatcatctatcgccttgcggtaggttcttgctactgttgccacatagagagcggtcttcatacgtccctctatcttgtagctgtctattcctgcatcaatcagatccgggatatgctctatcatgcacagatcctttgagttgaagatatatgtgccgcgctcattctcgtataccggcagatactcacccggacgcttttcctccacaacagagtatttccagcggcacggatgtgtgcacgcgcctttattcgcatcacggcctgtgaaatagttggaaagcaggcatcggccagaatatgagatacacattgctccgtgcacgaaggtctctatctccatcctgtcatctatatgccctcttatctcctttatctccttaagcgaaagctctctggctgtcaccacgcggctggctccgagattccaccagaactgatatgtgccgtagttcgtgttgttggcctgtgtgctgacatgtctttctatctccgggcagacctcctttgcaatcatgaaaactgccggatctgcaatgatcagtgcatcaggtctgtccggcttcatattgtgaagctctgtaaaatattcacgcactccgtcaaggtcatagttgtgagccaaaatattggcagtaacatacactctcacaccgtgagcatgcgcaaaggcaactccctctgccatctcctccattgagaaattcttagccttggcccttagtccaaatgcctctccaccgatgtaaactgcatcagctccatatataactgctatcttaagtacctccaggctgctcgccggacaaagtaattctatttttctcattttttctcccatacagttttgtattcatccaatatattctacaccggttactatagttttgttgacaccgtaattccatcgcctataggcatcactgccgtcaccagctcatcggagtgtgtaagctcgtagagatactccctcatacgcttgtagatggtacggtttctacgctcaacgatatagtgcgattctataatatcgccatcctgcagcacattgtcggacaccagcaccccgcctgtctttaaaaggcgaagcacctgcggcataaagttgatatactgtccctttgccgcgtccataaatatcatgtcaaactgtccttcaagctgtggaagtatctccgttgcatcgccctctaagagtgtaatctgctcctgcttcccggctctttcaaagttggcctttgcgataggtattcttttttcgtaattttcaatcgtcactatctgacaacccttcggtgcatactctgccatcaaaacggcagaaaaaccaaccgctgttcccacctcgagaatacgcattggtttttgcattgcaagaagcagctttaaaaagctctgcatctcttttctgataatcggaacgaagtctcttaaggcttccttctctatctcatctaatacaggcgtgttgcctctgtccaaggaattgatatatgtgacaagtctctcatcaactatcattcttgtatttcccaatctaattattgacacaaatgcgcttaacggataattactgtgtatccgaaggctccgtagtctgtgtctgttcttcatcgctcttgtcggaggacatgattaccatcatatcctttgccgtcattgaagtgttgagtgtgtatatccctggctttatatgtcctgagtaagcagacagcttaagctggagataaaataaattgtgatcccttacaaggcccttgtcctctaaaagctgtccaagctcctctgcggagatgcccttttccacatgaacgagtacatcctgaccttcgccgtttgtcatggcaggctcagtaaaaactctgtagccaaaatcatagcagatgctgcagatttttatgcccgcaaacagcactaaaagagcaatcattattgaaaaagcaacccttataaaaccaaataaagccttgttaaaatccataagctgttcctacacttccataattataggtataatcatcggtcttctctttgtttccttccaaacaaagtctcccaatgcatcctttacctctgtctttatcttgccccagtctgtcacattgttatctgtcagacgctccattgtgtcatccagcacgcattttgcctcatccatcaggctctcagaattgcgcacatatacaaatcctcttgatactatatcagggcctgcaagcagctgacctgagccggcctcaagtgtcatcacaacgatgatgattccgtcctcagccagacgctgtctgtcacggagcacgatatttcctacatctcctacaccgagtccatcgaccatgacattgcccacatgcactctgcctgtcaccttggcaccgtcctcattgatttcaagcacatctcctgatgaaaggatcttgatgtgatctgtatcatatccgagctgctcggctattttagcctgtgccacaagatgcttgtactctccatgaacagggattgcgtactttggattgacaagagaataaataagctttatatcctcctgacacgcatggccggaaacatggacatcctggaatataacgtctgcacccttcatcatgagctcattgatgatacctgtaaccgacttctcatttcccggtatagggtttgagctgaatacgatggtatcgtttggctttatggatacctttctgtgggtaccgtttgccatacgtgaaagagctgccattgactctccctggcttcctgtcgtgatgatgacagtctgctcatcaggatagcttctaagctgttctacatctataagaatattgtcaggcagcgacagataaccaagctctgaggctatcgaaatgatatttaccatgcttcgtccctcgatggctacctttctgccatacttctccgcacagttgataatctgctgcacacggtctacatttgatgcaaatgtagcaatgataattctgtttttcctgtgatcctcaaagatgccgtccaatacctttccgacagacttctcagactgtgtgaagcccggtctttctgcattggtactgtcgcacataagcgcgagcacgcccttctttccaatctcaccaaaccttgcaaggtcgattgcatctccaaatacaggtgtgtaatctaccttgaaatcgcctgtatgcacaactatacctgccggtgaatagatagcaagcgctgctgcatcctggatactgtggttagtctttataaactcaaccctgaagcagccaaggttaatgtgctgtccgtattttacgacttttctcttgacagtcttgagcataccatgctcttcgagctttctgtcaataattccgatggtaagctttgtagcgtatatcggtacatttatctccttaagcacatatggaatagcaccgatatgatcctcatgtccatgagtgataaagaagcccttgaccttatcgatgttctccttaagatatgtgatatcagggataaccaaatctattcccagcatatcgtcctcagggaatgataatccgcaatcaactacaataatactgtcctcatactcaaaggcagtaatattcattccaatctgctctaatcctccaagtggaatgatcttaagcttacctgtattctgtttttctgttttcttcaaaatattacctccaaatttatttcacgtacaactgcaatcctaatattcaagtgcagtgtcatcatccgtaagctcagaaaataccttagcaatagccgaaaactcaacatcgtcttcaaccatctgataaagcacctcttcatcctttgtgcttacttcttttaaaatatatgcttcacagtctccgctttcttctccttcggaaactaaaagatatcgtgttccattaagtgttgtctcttcttcaaccgcaaactcgacaacatcattggtctgcgggtcagtaaatttaattttctgcataaaaactaagaccgactatttgacagataatccaaatatccctgcaaaataaaaatcgccgcaatctcatcaacaaactccttgcgattctccctgcgtatgccggtttccatcatagaacggtcggctgcgactgtcgtaagacgctcatcccagtatatgacctcaagacctgtgcgccttgcaagcatatcaccgaattccttcgtcttctcgcagcgttctccttccgtgttattcatgtttttaggatagccgagcacaatcctgtccaccttgtactctgcaataatctcctcaatacgtgccaaagtctgtctgagcttggatggcgacttcctgcgcactatctcaacaccctgtgctgtgatcaaaagctcatcgctcaccgctactccgactgtctttgaaccaaaatcaagacctaatatcctcatattaatcccatgcgctgttctcaatgtatgtcttgagaacctcctccacaagctcgtctctctcaaccttcatgatgagacttctcgcgttattgtggcttgtgatatatgttggatctccggacataatatatccaacaatctgattaacaggattgtagcccttttcctttaatgccttgtacacaatctcaagtacatcgcttacctgaagctcaggctccttttgaactgtaaaaaattgtgtgttgttaatatttttttccatacgtttcgcccttcttgtaatattattttattataaatgtaataaaattacaaccttttattattcgaagagtaatatttcgtctgtaagcatacccgatatacggcctgaaactatctgattttcaaggttttcgtcagttttcttagcgaccttgacatattccttagtatatccgacaaagtattctttatcaccgattacggccttttcctcaaaaagcacctcctcattctttccgatatagaatttcctgaactccttagacatgtcatgaccgagtgctatgagcttttcgcttcgtgccgccttaatctgctcatctatctggtcaggcattactgctgcgcgggtgccttttcgctttgagtacttaaagatatgcatctcataaaaatgtatatgctcaagatatgccttagtctgttcaaactcctcctctgtctcaccgggaaatcccacaatcacatcggttgtgatggccggatgaacaaaatatttacgcaaaagctcacagcctctctcgtactctttagtggtatattttctgttcatcctcttaagtgttgcatcgcagccgctctgaagcgacagatgaaaatgaggacagattttatcaagctttgaaagctcgctcgcaaagtgctctgtcacaatcttaggctcaagtgacccaagcctgatgcgctctatgccctttactgcattcactgcctgtatcagctcaagaaggcctgtagcttcctcaaaatccacaccgtatgagcttagatggatacctgtcagcacaacctccttgaagccgtttgccgcgagcctttcaacctctgctattacattttcaaacctacgacttctgacacgtcctctggcatacggaatgatacaatagctgcaaaactgattacagccgtcctgcaccttgatgaaggctctcgtgtgctcctttgtctggtctataaagagctcctcaaaatcatgctttccgtcatttatatcgtccacggtatcgtttacactgtccaaagagtattcctcaagcagccttacaaggtcatgctttctgtcatttccgatgactatgtccaccgataagtcgtttaatacctctttttcacttgtctgcacatagcagccggctgccacaactattgagtccggattatttttctttgccttgtgaagcatctgtctggattttctgtcagccatgttggtgactgagcaggtatttataacatacacatcagctttttgtgtgaatggaactatctcatagcccgcctcctcaagcagatgctgcatggcctctgtctcatatgcatttactttacatcctaaattatgtaaggctgcttttttcattttatttttttactcctatttaattgacttttccttaaaaaactattactatctatatgacagtagttatttaaggaggttttcaatatgaaaacagtacagatttcattaaattccattgggaaagtaaaatcattcgttaacgctattactcagtttgatttcgattttgatttaatatcgggcagatatgtcattgatgctaaatcaattatgggtatcttcagcttagacctttctaagccaatagagctcgctatacatacagaaaccggacttgacgagattatggaagtattaaagccatatatcatcgacgaagccaagtaatacagacacaatgatttgattaattaggacctgaagctcaggtcctttttattttgctctaaggtggcactgattactcagcatccaccataatcacttctgtagtatctatagctgtcttcataagctcatctatcacatcgttaagtctttcctcagacttcttaatcctgtttatattcggctttgtaacaggatgctttgctacgaaaatagtacagcagtcctcatacggaagaatcgatgtctcataggtatcaattttgtttgatatatcaatgatatcattcttgtccatggcaatgagaggtctgtatacaggcatatggcacacctcgtttgttgcagcaagtgactgcattgtctggcttgcaacctgtccgatgctctcacctgtgataagacccaagcatttatcctcatcggcaaagtgctctgatatcttcatcatgtatctgcgcatgatgatggtaagctcatcatgaggacatttctcatatatggcaagctgtatatcggtaaaattgacaacatgcagctttatcttgcccgaatatctggcaaccttctttgccaggtctacaaccttctgctttgctctctcactcgtatatggcggtgcatggaaatatgtggcattgattaccacgcctcgctttgcaatcatgtatcctgcaaccgggctgtcaattccacctgagagcagaagcattgcctttcctgctgtgccaagcggcataccgcccggtcccggaatctcctctgaataaatatttatcataggtctgatctctatattgatcataacctgtggattatgaacatctacccttgtctcaggaaatgcctccagcaccttttcaccgactgcggcatttatctccatggaggtcatcggatagttctttctggcacgtctcgcatttaccttgaatgtaaagctcttatccttgtatacatggttgatatgctcgataactgcttcacagagcttgtcaaagccctcatcctcatgcagctcgaccggacagatacccacgataccaaaaattcttgacaatgtggcaactgtctcgtcataatcatagtctccgtctgtctccacgtacacacgtccgctttcctttcttacctcaaagcttccatccacattgcgaagctgatatttgatattcttaacgagcgcgtcttcaaaaatgtatctgtttttgccctttatcgcaatctcagcatacttgatcaaaaatgtcttgtacatgtaactctcctgttctggttttatttattggttttatttattatttattattttaattacttaatatttcattgtatgcgtaactttttagcccttcattgttaccggctatgccaatacctgcgatttctttgcagctcattagcgccttgtatatcttcgcagcattggtatcacctctgccatcactgataccgcgtaatcaatttcctcctgtgtggtattcacgcaaaagctgaatctgatcgtggaatccaaaagtgacggcttaagccctatgctctttagtgttgaactgattgccggtttgtttgatgagcaggcacttcctgcagacacatatatctgcctgtcctcaagagtatgaagcataacctccgctctcacaccatctacgctcacgcttaccacatgaggggcatttgtatggtctatgcgtccgtttaccgatactccgtcaatacgctgcactgacgctataaaatgatccctaagctcatacatatgtgctatttttttatcaaaatccgtgtaaatttcctctgctgccactccaagacctgcatatgcaggaacattttccgtacctgagcgcatgcccttctgctggccgcctccgtatataatcggcttgattttagtcttgtcctttatatataaaaatccgctgccctttggtccgtgaatcttgtgtccactgactgaaagcatgtctatattcatgcgctttggtctgatttcaagcttgccgtaggactgtatggcatccacatgaaaaagtgcggcaggatttttctcttttatagctgctcccgcctcctcaatcggcatgactgcgccaatctcattgtttacatgcataagcgatacaagaattgtatcctcccttactgcatttttcagctcttcaacacttatcacgccatcatggtttacaggcagatatgtgatttcaaagccctgctcctccagaaactgcatcacagccaaaaccgatgcgtgctctacagaagatgtgatgatatgccttcctgcacgcttattggccattgcagcacctattattgcagtattattcgactctgtgccgccggatgtaaatagtatctccttgtcctgcaccctgagtgtctttgcaatctttttcttagcatcattaatataattttctgcctcaacgcccttcatatgaagtgatgaaggattaccgtaatcctctgtaagcagcttataaaccatatctgccgctgcttttgagcatctggttgtggcagaattatccaaatatgcttccatttttgctcctaacttctacttcttaactgttaagtatctctactgtctatacatccaaattgtatacaagcatggcaagtgcagcaagtcctgctgtctccgtgcgtaaaatcctgcgtcccaagcttattctgtgcattgtggcatgctcatccacaagtgctatctcctccggtgcaaagccgccctcaggacccacgacaacaccgatagtctgaccagccttaagctgccccattatctctcttgtcgcatccatgccacgctcattctcatatggcaccagcgtgatgtcaagctctgaagcgattttcaaagcttccctgtatgtaaccggctgcttcacagtggggatcacagtgcgctttgactgctttgctgcgctctcagcgatagcctgccatctctgcagcttttttaatgcctttttttcatccagctttaccacacagtttttcatggcaaccggtactatctcagatacaccaagctccacagccttttgaataataagctccatcttatcgccctttggcagcccctgatacagcacgatgtgattgtcaagttctgtgcccgtttcatctgcactgtcaatagctgcgatgacctcatcatccagaatcgatgatatgtgacagaaatatgcctgtccggattttgagcttactcttattttttccccgtttttcatgcgcagtacattctttatgtgatttacgtcacctccggtgattgatatgctgtcagaatgaacctgctcttcctctacaaaaaactgatacataatccaccaaactatttagcctgcttctgcgcagtgatattgacccattcgccctgatgattgatttctatcaccttaagccccgctgcttcgatagcctctttaacttcattttccttgaaatctatgattcccgatgtgatgaaatatccgccttcctttaacctgtcaggaataacaggtgccataggaatgatgacatcagcaaggatatttgcaacaacgatatcatatttttctgtaccaaccttcttttgaagctctgtatcatctatgagattgccgacataaaacgtgccaagctcctcatccagatgattgacctgcatattgtcacgcgtagaaatcatgcagtcagcatcaaggtcagtacctacaacctcctttgcaccaagctttaaagctacaattgaaaggattccgcttccacatcccacatcaagcactgtaggtgcttcctttgcgccctcaatatacttgataagctgcttgatacaaagctgtgttgtctcgtgctttcctgtaccaaaggaaattccaggatcaatttctatcataaatttatccgcatcctcaggctttacctcttcccatgtaggcttaatcaatatatcaccgattgtaaatgatgaaaaatacttcttccagttattaatccagtcgagatcctctgtctcagatgacgaaattacaccgcttcccacatcaacagtatctcttaaatcctcaagtccaagctttacctttctaagcatatcagactgatcactgccatcatcctcaatataaaagctgacatggcttatgccctcatccggaggcagctccggcagaaaatcaataaacatatccgcctggtcctctttggtcaggggaatattgtcctcaatctcgattccctcgataccaagttccataagcatgctgctcatgaaatcctcagccgcggttgttgtctcaatcgtgtatttcttccacttcatataaaaatcctctcttaataaaatagatacatagtataaatacagttttatttcaaaacatttccgtacattttacaaggcagtcatacgactgcctccacaacttatctcatataataccataaaaatgtgctgtataaaagccccatttttttataagtaaaaatagcctaaaaaatgccccgccacacatgacgggacatatattataggacatctattacagatcatctatttacagatcgtccaaagactccttgagcttatccataaatccttttttctttttagaatcagtagaagctccgccctccttggtcagagagccgcctgaaagctcatcaaacttcttaagagcctccttagcatccttagacagacctgtaggcgtattgacaacaagtgtgacataatggtcacctcttattgctttatttcttgttgaaggaacacccttgccctttaagcggatacgtgtacctgtctgtgtacccggtgcaactgtgtatataatatctccatcaacagtcttgattcttatatctccgcctaaggctgcaatagcatacgagatggatgcctttgaaaagatattaacatcctgacgctcaaaatccctgctgcctgaaacaataacttcaacaagaagatctccacgcggtccgccatttatgcccggctcgccgtattcacgtattctgacacactgtccattatctataccggctggaatctcaacagtctttctgaccttcttggtattgtagcctgtaccgtgacatgtaggacacttatcctttactaccttacccgaaccaccgcaggatggacatgttgtgacattctgcactactccaaatagagactgactctgtctgacaaccttacctgtaccattacactgggtacatgtctcaggagatgtgcccggcttagctccgttgccgccacaggtagagcatgtctccttatagttgaactcaagctcctttgtgcagccaaatatagcttcctcaaaagaaattcttacactgagacggacatttgcaccctgtgcaggaccatttcttctgccactgcttcttccacctccgaagaaatctccgaaaatgtcaccaaaaatatcccccatatccatgcctgagaaatcaaagccaccggctccgccgcctgtgccatcaaatgctgcatgaccgaactgatcatactggcgtctcttatccggatcagacaatacggcataggcctcctgagcctccttaaacttctcctcacactctttatcacccggatgaatgtcaggatgatatttctttgcctgctgtctgaaggcttttttaatctctgcatctgtagcggtcttagatactcctaatacctcataataatctcttttttctgccataattgaaaattccttttattatacaactaattcgcaaggccggccaagcggccaaccttgcgagtaattttacttacgcagccattatgatgctttgattgataacccgaattacaggtcattaatcctcatatcattatggcagcatctgtttaattatacttccttgaaatctgcgtcgatgacatcatcatctgcaccgtttgaagcgcctgcattcatatcaggtcctgcctggcctgctcctgcattcatgtcaggtcctgctcctgctgctccctgcgctgcctgagcctgctcatacatctttgcaaataccttctgagcactctgtgtgagcttctcctgtgctgccttaagctctgcaacatcagcctctgtcatagcctcagcctctttatgtgcatcaaggaatgacttaactgctgcgatatcagcctcaactgctgacttatcagcggcatcaacagaatctccaacctgctttaatgcatcctctgtctggaatacaaagctctcagcatcatttcttgcatcgattgcttcttttctcttcttatcctgtgcctcaaactcagcagcctctttaacagccttatcaatctcatcatcagacatattagatcctgctgtgattgtgatgtgctgctcttttcctgttccaagatcctttgcagacacatttacgataccatttgcatcgatatcgaatgtaacctcaatctgtggaactccacgacgtgctggtgggataccatcaagtctgaactgtccgagtgatttattatcgcgggcgaactgtctctcaccctgtactacgttgatatcaacggctgtctggttatcagcggctgtagagaatatctggctctttcttgtaggaatagttgtatttctctcgataagtcttgtagcaacaccacccattgtctcgattgaaagagaaagtggagtaacatcaaggagaagtacttcgccggcaccggcatctcctgcaagcttaccaccctggatagaagcaccgattgctacgcactcatcagggttaagagacttgcttggctcttttcctgtcatctgctttaccttgtcctgtacggccggaatacgtgtagaaccacctacaagtaatacctgtccaaggtctgcatttgtaacgcctgcatccttcatagcgttctgtactgggattgctgttctctctacgaggtcatgtgtcagctcatcaaatttagctcttgtaagagtcatatcgaaatgctttggtccctctgctgtagctgtgatgaatggaaggttgatgtttgtagtagtagctgaagacagctccttctttgccttctcagcagcttcctttaatctctggagtgccatcttgtctgtagaaagatcaacgccctctgccttcttgaactcgtcaatcatccactgtgttaccttgttatcgaaatcatcaccaccaaggtgtgtatcaccgtttgtagataatacttcaatgactccgtcaccaatctcgatgatagatacatcaaatgtaccaccaccaaggtcataaaccataatcttctgttctttctcattgtcaagaccataagcaagtgctgctgctgtaggctcgttgatgatacgctttacatcaagacctgcaatcttaccggcatcctttgtagcctgacgctgagcatcgttgaagtaagcaggtactgtgataactgcctctgtaaccttctcaccgaggtatccctctgcatcagcctttaacttctgaagtaccatagctgaaatctgctgtgggctgtagctcttatcatcaatctgtaccttgtaatctgtacccatatgtctcttgatagaagaaattgtcttctcagcatttgtaactgcctgacgctttgcaggctcaccgataagtctctctcctgtctttgtgaaagcaactactgaaggagtggttcttgcgccctcctggtttgctataactgtaggttttccaccttccataactgctacgcagctgtttgttgttcctaaatcaataccaatgattttgcccattttattttcctcctattaaatatagtgtttttacatgtttaatatatttgtaaccatccgttgtctcacatgaatccattaaatgctgtctgcattcatataaatctgattcactgtcatgccggatagatgtacacatcattactgtactaccgataccatgctgtggcgtaccactgaatccttgtacatatagcccttctgaagctcctgtgctactgtgcctgactcaagttcatcattttcaacctgcatcactgcattgtggaaatcagggtcaaactcctgtcctacgcactctattggctttacacctgcagcatcaagctctgtgagcatctgcttgtagaccttatccatacctgtgataaaaggatcatccttcttatcatccggtactgctgcaagacctctctcgaaattgtcgattacaggaaggattttctcaactattgtctttgctcccatgtcaaacatctgggatttttccttctcacttctcttgcggaagttctcgaactctgccatctgtcttttcagacggtcgttaagttcttctatctgctcatccttcttgtcttttttctttttcttgaagagacctttcttttcatctgcatcagccgaagcttcatcctctgatttggcttcattcacatctgtattttttgtttcttcggctgtctgagtgctttcctcatcagctccttcaatctctatctcttctgctttgttttctgcagtctcattgtcgattgtttcttttttaatatcctctggcatttttgaccaccttcctatgtttcatcctcagacttcttataaattccatctaactgggatttaagagtctttagattatccattactttttcataatccatgcgctttggtccgacaattcctatcgtgccctttacgccctcaccaagatcatatgtcgcagtgacaacactgcagtccttcatggtctggatcggagattcatttcctatataaacctgaatacctgttccattgtccttcttctcggaatcggatagggattcggtaacaaggcttgctagctcttccttttcctcaaatgctgacaaaagtgtcgctgcattattggaatccgaaagctcaggatacttcagaatatttgtcgctccgctggtgtaaatcttaagatcctcactctcagcgaaagtctgtgccaatgcatcaatcacatcagagacaattcctgaatgaataccggctctctcctttatgcttgcaatgtttccaagattaatctcgttcattgcgagtccgtttaatgaggtgttaagcagaatgttgagcttaagtatcgtctcattgtcaagcggctcatataaatcaagcatcttgtttctgaccatattgttattcataacaattactgcaagcaggtgctggtcgtcaacctgtgaaagctgaatgaatttcaccttgttgtgattgacatccggtgcagaaacaagtgtggcataattggtattgtttgcgagtacctttgccgcctgctttaacacctgctccatcttctcggtattttcaatgaccagctccttcatatcagaaagctctttttccttcttatcattggtctctataagatggtctacatataatctgtagcccttatccgaaggaattcttcctgctgaggtatgtggctgtactatatagcccatctcctctaagtcactcatctcatttctgattgttgccgagctcagattaagatctgtatattttgaaattgtacgtgagccaaccggctctcctgtggcgagataattgcggatgatcgcatccagtatggtaagctgtctctcgctcaattctagttctttgttttcattttccattggtcacacgctccatctgaagtatgctttttaatttgttagcactctatattttggagtgctaattttttatctgtacataacataccaccacctattagcaatgtcaaccctcgagtgctaatttttttaataaaatttttgaaactcttgattttactggggtttcaggctttattaattttctattaaattgattttggcggtatttacaccacttttacaccattttttcaagtttttcaatttcgagcttagcatcaaatgatacgaaaaagcagtcaatcataaatgcgaaagactgctttacctattaattatatcattgaatattgatcatcagatattctgatttacagccggttttaaacttaatagcccagtctgcaatacccgaagtcactataaaatttgtactatcgcgcttttcatatccataaatcctgtcatcaggtgtcattcctgtaagtttttctaccgtcataagcggaaaaagctgtcctccgtgcgtatgacccgaaagaaccagatccactcctgagtctgcctggcttgcataatcttccggttggtgatctaaaacaatagaaaatttatccggatctaagtcttttaccagttcttccatgttcttccttcccgcaccgtattcttcagatttgtcagctctcccgataatataaaaccggttgtctatcagttctacattatcttccataacatggacattattcttttctaaattctctttaagatcagcaccgctataacctcgataatcagatggataataacctttatcatggtttccaaaggtataatacacaccataagtacattttaactcgccaagtgcccggcatgcccttaccatatccgctttcgatgtatcatcatccacgaaatcaccaacgatcaatatgatatccggactttgtgcctcaatttccttcatatgtccggcgaagccttctccatcaaatgttgctccaacatgcgaatcagaaaatacagcaactttgagatttccaacacttttatccgtatgtatttcatatgatgtctgccatacatgatgcgcgcagtaccatcctgcaccaagataacacaccgtaaacacgacggctgttattcctgcatagtatcttttaaattccttttttcttattttttgtattatcgtaaaaatcccctcagcaagcagccagaatacaagcagatgcaaaatacagacaatagcattcatatatccccatgcgagccaaatacttgctgataacgctattaagattatcagtccgatcagaaagcaaatatttcttttttcttttgcaatccttttaataatccaaaatctgccaatacggctggcaagatacaaaattcccgctgctgacaaaacagcaagaattatcataagaagtccccacatgttcatcttttgttctccttcaaatcacttattcaaactacttattaagttccagatcattgatccagcctgtaacctcatctgcacttacaccagacggaaaccttttgccatcctgccagtcacctgttcctgcctgtttctttaaaagctcaccgctgtctcccaatcctgatgaagttgatgtggcaaacggaataacagtctttcctgtaaagtcattaagctgtacaaagctgtttaccggccaggctgcaattccccaccagattgggtatcctataaaaacggtgtcataatcatcccagttgtcaactgtattgtattcaagttccacatctcttgtctcaggattattatgttcctgagttaccctgctgtttttgttagtccaatccagatcatcacttgtatacacgtctgtcggcacaagctcaaacagatctccgtctgtctcttctgcaatattctctgcaacagcctttgtatttcctgatgccgaataatatactacaagtacctttgatgactctccattattactttcaatctgtgtcgacttaagttcctgtttagttttagttgcttctctgtctttacttgatgtacatcctgcaatgttaacacatgcaagtgttccgataagaattgccgggattagttttttaatactcatatttgctcctttactgttttatctcattaatttttctcttttatattttttgcataacgcttcgatggtctgcttattatcaataaaataaatatcaataccgcagtaaacgacagactaagcggatatgccatcatgattgttctaaatgttctactttgcagaaatattaagctactattttttctgtatctttgaaccaccaaatacctgcgacattggtatactgtcgagcatctcatctattgcttttacttcatcttttgtcagttttatctcagatgctttcatgttctcttccagtctgcttacctttcttgttcccggaataggaacgatatacggtttctttgcactcatccacgcaagtgatatctgggccggtgtagcttttttctcctctgccagaagttttatccagagtataaattccttattttctttaattccttcatcactaaactgtggcatcatgcttctgtaatctcccggtttttcgaattgtgcatgggaattatacacagctgtaaggaaaccattcgcaagtggagaaaaagcaacaaatcctattcctaattcttcaagtacagggaataatttttcatagtccctatacatcatggaatatctgttctggatcgcagttatcggacatactttattagcgcgtctgatcgtatcttcatctgcctctgaaagtccccagtgcgtgatctttccctgttcaatcaattccttcattgcccctgctgtctcctcaattggcaccgtcggatctatacggtggatatagtataagtccagatgatctgtgttaagacgcttcaatgagccatcgatcgacgatttaattgtctccggtcgtccatccgggatcaacggtttattaacagttgttgctgtttcatcaaatcgtatgccacactttgatgccagcactattttgtttctatatggcttcaatatctttccaagcagtttttcattgtgatgcgggtcttctgctgttccgtatatctctgctgtatcaaaaaatgtacagccacagtctatggctttatctatcaaagcctctgcctctttttctgtcgatacagttccgtatgcatggctcattcccatacatcctaatccgatttctgatacttccaagtctcttcctaaaattcttttctccatgtttaaacgcaccctttctttctatcacttattttcctaaaataagtatacgaaaaagagacttccataagaagtctcctttcgttaatcagtttaaacccagaggttaaggtttatttataagatccctgatagattgcaacacaatcttcatcagtaagcttatacatatcattctcgaagttaattccaagagtagctcttgcattttcagccatctttggaaattcctcaggtgtaattccataatcagacattttaaggtctgttacattacagtcttcctgtaatttaacaagcattgttataaaatcttctggtttttttgcatcttccatacccataagctttgccatttcaatgaaacgatcatcacagacatgcttatcgataaagaaactataaaatgcttttgaaatcataataagaccggctccatgaggaagcttctcatgatatgccgaaagtgcatgctcaagcggatgtgcactgacgcatgttccaactgtcatctgtatgcctgaaagataacttccgaatgcaacattactcattgcctcaatgttttcaggctcacgaattgatgtaacaagattgcatgacacatttctgattgcctctgcagcaaccatcttgctgaattcatttctatttgcggaaatatatccttcagtagaatggaataatgcatcaaatccctggtatgccttgaatgcagccggaacacttgtcatcaattcaggatcaacgatcgcaaggaccggcatagttcctgtaccaaatactcctgttttctcctgggtatccggattggtaataacaccgccgccgtcagtctctgaacctgtaccggctgttgttgtaatagccacgattggaagtgatggcatcggtggccactgtttctttcctgttccaaacataacataatcccagagatcatcactctcattagttgccataatgccgattgctttcgaagcatccattacgcttccgccacctaaagcaacgataaaatcacagccattctctttcgcaaattttccgccctcttcaacaacaggctttgtagggtttgaacccactttatcaaaaataacatattccacattactttgcttcaattcgttctcgagtctgtctaaatatccgtttgcacgtgtagatttaccatttgagataacaaccaatgccttacttccatgaacagctcccattggtgtatttatctgtgtatgaagttcatttaatttacctgctccaaataacgcatttgttggtattgaaaaattaaaactcattatttcttctctccctccggaaaaatgatcttaaaaacaaagaaaaatattatcatagatactccacctgtaataaatgtaacaagaatattgtatattgcaggcggtacataaacagccgcgataggcatccacagattattcagtccattgcatatcagtgatatgactacccatgccagaaaataccagattgcctgatataccggattgcccttacttttaaatgtgatatttctctgtaaaggaaaattgatgcactgtgcaagaaaagatcctgtttcataacttataaaataaccgagaccaccacctatcatcactgcacccgatgcatctcttagtacatcatatcccaacaggctccatgtaaattttacaccaagtatattcatattttttcttggccacataaattctgttccggcaagtcctattccaaggatgtgaggcataaacgtaaataccagatactgaaatattgtcactcccatgctaaaaacgaagaaataaaatatctgatatacccatttggataatttaggatgtttttctgtaaatgatttccaaaattccatttcattttcctccgtttgaattaagtttctttatatactttttattgagtctcctgtttctgaaaaatcctgtaataacaattccgaatcctttgaaaaaatgaccgtttacaaccatcattacaccgtctatcatttccatacttacaattccgcctgtcattttggcaattgccctgaatggaatattgtattggaataaaagatttaggtcggtcttacccagctcttcattttttttcaacttatttgtaagtattttatagataaaacgcgcaagagcactcttggcataatacatctggcagacagcatcatttacatccagctcaccgcgccattttccatcgggaatcgttctgtcaagtaattcttcaaattctttatcagacactttctgtatatttccggaaaaataagatggcatatgatcttttgaatatggatattctgttgttgtaccgtcaatatttatctgccctgtatgccttatatcctgacaatccgctccgaccatcacctgatattctccggcttcgacttcccattttgaagtaatgatattccaatatctgaatgttttatcatcaaaatctatatttatatttctgctttcaccagccttaagaaatacctttttgaagccttttaattccttatccggtctgaaaatctttgcatcctttttgcctatgtaaagctggattgtttctgcgccgtcaacatcgcctgtatttgtcactgtaatccttatgccatcgttattgacgataagatcactgtacttgaaatttgtataagataatccatagccaaacggatacagcactcttatgtttgctgtatcataatatcggtagccgacaaaaattccttccctgtattcagagtttctctccacacttggaaaatatctcagggaaggtgtatcctcatatctgaccggatatgtttcattgagcctgcctgacggatttattttgcctgttattatatcaagcatagcttgggctccggcctgtccgtacaggtaaccgtgaatgatgcccttaaggcaatgatgccatgacatttctattgctgatcctgcacttagcacacctactatatttttatttacctttaccagtttctcaagcaaatgtatctgattctgcggtattctcatgtgatttctgtccacaccctcagattcactaagttcatcgagtccgaaacagtaaataaccacatcagcctgctctgccagatcaattgctgctttttccatgatagcatctattccgcctgaacgaagataacctcttgtgcatcctacaacatgaagtgtagtattattgatcagcatattcatgtgctctacagaggttgcattcacaactgacgaacccgagccctgatatctcggaacataagcaaaatcacctataagagccacccttgtatccggtttaagcggcagtatattgtcactgtttttcaataataccgcactctcggcagcggctctgtaagccagatcattatgctttttaaatcctttatcatctattttttctcgttcctgtgaaagctcaaaaactgcctcaagcatgcggtcaacgctgttatcaatagtgctttccttaattctgccttcttttacagcttttataagctgccttgccgaatcaagtccgggatttggcatttccagatcagatcctgcctgtacacctttaacatgatcatttgatccgccccagtcagttatcactatgccgtcaaatccccattcatcacgcaatatatcagtaagaagatgtgcattttcgttggcatatgttccgtttacctgattgtaacttgtcattatcgccttcgcatgaccttccttaacagctatttcaaagcctgtcagataaatttccctgagcgtcctctcatcgacaactgcattcatagccattcttcttagttcctggctgtttaccgcaaaatgtttcggacatgcatatacaccctggctctgtatgcctcttatatatccggctgccatttttcctgcaagatatgggtcttctgaaaaatactcaaaatttctgccacaaagcggatttctcttgatattaagtccggggccaaggacgatatcaacaccctgtgtattggcttcctgtccaagcgcctgccctatcttatctccaagctccggatcccagctgtttgcaaccgttgcagctgttgggaagcatgtggcaggaagggagggattgagaccaagatggtctcctgtccctgcctgcttacgaatgccatgaggtccatcagaacagtaaattgaaggtattccaagcctgtctagattccatgtctgccattcgcctttgccgcttaataatgctgctttttcttctaaagtcattttatctatgatttctttatgtttcatcttactcaccatcggttacgataatctgatcattatttcttttcttacggtatctgatgatcaaagctgcttctgctgcaattaagagtacagccagaatcgcatctgctgcatagatcattttaagccatcccggagtctcacccggcacataattttcatacgcagaactgtttactgttgtatacagaatgtttttaacagcttttctcatggcgataactgatgtagcactaagatctgtcatgatagcatcatttcctgctgttccgagcatcatgtcggttcctcctcttacagctctgtctgcatccatatatccatagttgccaaagtaatctgatataaccattcctttgtatccccattcacctctcagcacatcattaagcagctgtgtacagcttcctgcccactctgtaccaaggaaattgtatgaagacatgacagctatctttccatccggatatgcttttatggtatcctcaaatggtttgaaatatatttcacgcattgcctgctcattgctccaggtcgtaaggaatgcatttctgtttatctcctgctcatttaaaacaaaatgtttgataaacggatacattccggcatttactattccttcaacctctgcttttgccatttccgcacttaatttactgtcctctgaataatattcaaagtcacgtccaccgaatgcacttctgtgaatattcatagatggtgcataccagccggttacatgataatccgcaaattcctgtcccatggcctcagaaaatgctactgcaagctctgtattccatgtctgtgccaatattatctctgaacagaaacctgttccgaatattccaagagtactagagtttactcctgccggtccgtctgtatcaagaatacgtatcttgtcaatagatcttactgcaatattctgatgtccgccaaaggctataaggtcaaccatctcgtctaccgtcatctcatcaagcagatcttcccagcggtcatcatcgtaagaagctcccctcaggtcaaataactctagaccattgtcagctcctgttgtaggcatcttatcgtcatcattatcataatcggtcggatcatatgtaccgtttccataaatggttccgtctaactcaaaatttgtcggagctgctgtcgctgtatcataatttgcaaatccgtcttttcttgaaagatatgtaatatcaccttccacaaaatcaaatttgttgtcagcaacttccacatctccgttgtgcttagtattctcatcatatacgatatcttctgccacattgtaagtctttgaatccacaacattatggctgtctgttcttaaactgatatcataatccccatgctctaatacatagtgtcctgctccgtatgtgtcatatgaagccatatcctcatcactgaatgtcagtgtcactgtctctgactcccccggctcaagaagatctgtcttgtcaaatgcaagcagattaacacttgatttttctattccgccattataatacggtgggtcataataaagctctactacatcttttcctgctgtgtcacctgtatttgtaacagtcacatctacactgattccatcgtctgaagcccggagctcgcccattgtttcatcaaaagtcgtataactgagaccatatccaaacggatacataaccgtatcatcataattgataagtccttcatccgctgctgtctcgtaaaatctatatcctacatagataccttcaacatagtctacaaatgatacgattccgtcagctctctcccacgctttcttagctgcgtcggaaactttatctgtgtttgtataagcaaagtgacctatgttattgatataaggagccttgtttatatccttaagccatgtatctgttgtttttcctgacgggttgacctctcccgatatgatatttccgagtgcattaaaacctgttgcacctgctccggcacataaaagtacactcttgatctgctcataatcgtttgtccagccaagctccatcgcatttgcaccattgtatacaacgattacatcatcaaaattactgcatacgaggtctacaagatcctgctctgttttactgagttccagatatgactgtccgtcttcaaaatcatcataatcttttgaattatttgtataagttccttttgtgtacttagttcctatatccatggtagaaccatccattataggtcccatatctattggaagatcagttccttcacctccggttctcgagagaacgatcatcgctacatcagagaagtcttttgcatcatttatgatcttatcggaataatcagctgccggaacctcaggaagtgtccagtcctgaccatcattgatgctgatcaccggtctgtcctgtctgtactcagtgtacatatcagacagctcactgtttgtctcaaaacctgcattttcaagtcctttaagtattcctaccgctgtagtagcatcgactgttccggatcctgttcctccatataccggattagttgatgaccagccgaatacattgatcttctgtggtacgatcggtaggaatgaattatcattttttgtcattaccacaccctcattagtcacatcttcaatcactttttttgaattgtcgatatgaccctgatcaagagttcctttgtccgataacacgacattcaacgtgttgtacaaagtttctgcagcagccacatttaatgtaactactgttatgagtaagaaagcaaagaatgactgaaatcgtatcattctctttatcagtttttccttctttcttacaatgatcataaccgcgatcatagctataaacgcgattgcaatgatgatcagatgtgttctgaccatgttaataacacttatgacatcttcccatgccacttcaacgttacccatacgtaatcctccttttttcatgtatgtttcgttgaaatgactatatcaaaaaaggaacctcaaaagtgcactctggttttcttggtcccttttctggtaaaactggtattttattgttccggaaaaaatataatgtccgttataaatttcattttatctgttctcataagcatggttccatggtaatgatccacgatgtagcgtatgctctttactccgaatccatgatagtttttgtcttctttagttgtaaccggcaatccatcatcaaatgtgatttgctcattgcagtaattctcaatatgaatatgtgctcccttatttttctctttaacactgatactgataatacgcttctcatcatcctcctcttttataacactttctatggcattatccatcaaattgccaaacaaagcataaacgtccgtagttttcataaagtttagcatacttccatcaaccatagtactgagctttattctatattctgtacacagaatgctcttttccgtaagaacaagatctaacgcttcattgcctgtctgaaaaatattatcataaatggcaagtgcatttcgcacatcatcaacatatttcttctgctcgtcagcatcctctattctcgttatctttgaaatcctgtatttaaggtcatggcattttatattgatgatatcaatagtttctttcgaaagcttctgcttttctcccatattatttatcatctgctccatcatctctttctcacggatgatctggttctgccttgacatattaaatgccataaatactgccagtatgcagcatacaatcgcatacattttgcaaaaaacattctgaagccggctgctgtcaccgctaaacattgtactgtccaccagcacactatttacaacaactataaacaggatcacaagtgcaagtgttatcatgcgtatatccttctgcttgtgctctgattttccttcataatgcctgacaataaaaaaatacgctgctgccgatataacaatatatggtaaaatacgtatcacaataaaatcaatgtatacatttaatttcatgtctattatctgctgtattattgtaataaacgcataagcaatatgctgcgttgcatatccgcatattcccgcaaacaatatttcctcaactttatctttaaaacatattgccatagaaagcaggctgcacgcaaatataccaatatagtaaacaatggatataacaggattttcccacggaacagccgataaaagttcaaatatcagtagtgaaaccgaaaaatacatacatattgccgccactgcttttattatgaaatgctttcttcgttcaaatgcaaacgtgtaaatactttctgttataagaagctggatacagaaacgtatacaagatataatctgcatatttgtcattagaaatcacctcccagatatctcataaaatcatccttaaatttcttctttcgctgtctgcttataggcagacacacatcctcaatccatacactgtctttgcacatttttgaaacatatttcagatttacaagacaaccatttatgcattttgaaaaaccttccccctgcaatttgttttctatatcgatcatagtccctctcgcctgaaactcaccctgctttgtgtgaaatacaagataatttttgtttttctctatatacaatatctgagagacttttattttcattacagaatcattgtcatgtacgattattgttttatccttattaagttccaaagaacgcattgccttttccagcttgtccttaaatacataatagcttatcggtttaacaataaaatcaatcgcatcaacctcatagccatgtatggcatattgagccatattagtcacaaaaacaatagctattccggagtcgagttttcgaagctttctggctgctgtcattccatccatatgaggcatctcaatgtctaagaaaactatatcgagatttccacgatactcttctataaaattcagaccatctgtatactgtacaatctcaaaatttgtatttgtttcattcttgtacgtattgataaattcgcatatcatcttctgatgttccaagtcatcatcaattaaccctacacgtatcataaaacctgctccttcatatataatatataagccgcagcaatcaagctgcggcctgaaaagattaacattaatgtataaaattggtaaatacaaaagccggtgcctgtggcatttctattcccatctttgatgcaacatttttgcagttgataaaatatgccatattgttgccaagcacctgcataacctgcattccctcaagatcctgctttacttcgtcaggatttgttccatgtaccatattccaatatgttgtcctccttgttttcttttcatcttacaggcatattataaatcccatatacctataggagaagtttctcttagttttgagtcattaacctatcggttatcactgtttctgcttatcaaacagccaactcattatagccttatcctgaaaaaattatttttcttttgtccatatatccaccttccttttcgtcttatctcgtcttgtactttttcataagcaaaccggcataatatccgatgaatgctataagtatcattacagccagataatctgccataaaaaacagtacgctttccgtgtaatcataaaatacaaaatgcattttcatcaacagataatcacctatctgtctttttatgaacgcatacacaccatataccgccaatataaccgcaatcgccctcgcaatccattttcttaccgctgacggctgtttgaaaatcctgcctaccattataaccgccatattccaatgcattcccaggtgaagcgacataattataagtccccaatatgcacaaaacatatgtacctgtcttgccatcatatatgagccttcaattcttaccatgccaaatatatgatcagacagcagtattccgcttatcatagagcctatcataagtataaacatgatcatcgccagtgctgtctgcacacccctgaaaagagtgtattttccttttgcgactgttgccagccatttgcggtttaaaatatgatgcgctataaaaagcacaaacatcgccatgcctatccattcatgtagggtctctccaagcagactgtatggcatgagaagaagcaggcatgctgtcatgcctatatctatcataatctttactgtcagttttttgtttttcatcatatacctcttatcctatgatatctattttgtgttttcctgccagaatgatactgcacggtctatccagccctctgccacggttttctgtcccagtccgaagccatgtgagagtcctttaaacacctctaattcggcatttgtcccattcttctttatctgtgaaatgtatctttccatactcctgtaagatgcaattccatcactcattcccacacacgcatatgtaggcggttcatttcctgtcactactgaaagccctgtatactgcataattaccgcagccggtgccggataactatcctccccaaaatatgcagttccgtatgatccaagccatgctgccattctcgccccggcagatcctccccagagagaatagtcagtcatatctatctgcaattcgtccgcattctcatacagatatgctatcgctcttgccagatcttcacaggcagtctgcgcacccggtctgtagatcagggcaaacgcattatatcctttttttgaaatctccaatgcttgtggaaagctgtcatgtatacctgcaacatacacaaatccaccacccgcatttattatagctgttttttctcctgcatttcccctgaaaaagaacagacctgtattccttttttcaggatccgcctgcatctcatcttcactgtatatattataaaaaatcctgttaccactctcactctgatttttcatataatttacaatctcaactgttttatctgtatttacctcactgtaccacggcagtatggaacttacctctgaaagctttaagtcatcatctattttaaaatcagttggaaaaataagtctgccgtaatcctcaaataccggatcatttatcacatcacttatcctgcttttcgctgtatatccgccctttatatcgtacaatgaatcattgttccaagtcatatcattgctcccttcgctttgagtattttgagtattttcggcatcagtctgcttttcccgattggttctcccacatgcactaaaagtagtgatcaccaaagcacatgcgattatcataatctttatacgcataacataccctccgtatttctttcggataaagtatatagaaaacgagactccctaagaagtctcgttttgttatgctgtataaaccataaggttatgcctttattttgtttatggcttttattagacgtctgaccttttcagatggctcctttgagtgtagtatgccaaacggcatggtataatcccactcaaccggaataatccttataagcgggtgaacactctcccagcttttgaatgcaaggagcacttcattattgttctcacaccggttaaatgcttctatattgtataaatcaaaatctactatgtttatatccggattcttaacagcaataaaatcccttaatttatcgccataatagctccaacctcgcttcataagcataagattttcaccctttagatcatctagtgtaatcttttccttctttgccagcctgtgatgtatcgacactgccacgcaaaacggctctcttgatatctctgttgcatcgcaccctctgagtttaagcatggtttcatcaaatatacctgcaaccacatcaatattctgccccagatttgccagtatttctcttgcattctcgatcgtattttcaaatgtaataagctggaatttcatatccggatatattttttgtatctttggccaaagctcgacaaagacagccggaggagtcatcggagagactcctacacgtatcacattgtctgaaacatccattgcttcctttgcacgtcttatcgaatctttgcagtaacctactatatattttgcatcattatatatagactgtccggcatctgtcacaaccagacctctgtgtgttcttgaaaaaagtttcagatcaagacttgcttccagcgaatttatctgttttataactgccgttggtgaaatgtaaagcttttctgctgccttactgaaacttcccgactccaccacacatataaatgtatcaagctgtggattgtacatcatttctgggtcactcctttttatttcatttatctactaatattgcgttaaaaactctcctgtgataatatcatattaccacactgtagttactacctggcaagtaatttggcattgtattttataaaatatttgtaaaatttatttcattaaatgtaggagctgcatgatgtataataaattatcttcgtttcaaaatctctattattatatcataattttccggtttatgcggaaatgtacagtctgtacataccttaagcggcttaccgttcttttcgatataacgcttatttcccggacagtttttcatttcatacaaaggacaataacagaacagacagttgaagtcatcaagtcccttgtgacacggaaaatatttgcactctgtgtttttaaagtatttataagagttttccatttttattccttctatattcatattcatatgcttttctcacaaggctctctgcaaaatgcggatttgacggatagtacaggtgcggaaacccaagccagtaattatcatggcttatcacgcagtcgtagcttctgcctgtggccggcttggtcgcaatacaatcggctccgttatcggtgctgtcgtaataatgaaattcatgcgcctttattttttcatttggcggtagaaaattgctatgcttttccgcaagctcaatatatccgaacctgacaagctttcccttaaaatgacacccaccatccagtgcccccacaagcttcgacttattcatatcattttgtatatctgctttattttgtacatcaggcttgttttgctcatcattatcatcacagatatcatgtatatatttgtgtagatacataaatccaccacactcggcaaccgtcggcattccggctataaaagctttttttatggcattcagcatagatacgtttttactcagttcctttgcatacagctccggataaccgcctccaagcagcattgcatcacaatcctttggaagcctggtatcgtgaagcggtgaaaaatactgtaattttgcaccgcatttttcgagcattcttaggttatcttcatagtaaaaacaaaaggcttcgtccatggcaacagctatgtttacggtatttattgctttattttgcgaaaattcattttgatcacaattacctatatttttttcattatatacatctgcattttcgctgtcactaatttcatctgccgcttctgctatatctataaacaaatccatatctattgtcttttttagtctgtcggcagtttcattgagctgtttttttatatctaaaagctcatccggcatgacaagccccagatgtctgcttgaaagcccgatatccttctgttccggaaaatacccgactacttttacggaaagctccttctctatcagaggctttatgatgtcataatagcccttcgacatccgattgagcagaacccccttaatcaagtggtgcgtgtcatactgcaaaaaaccggctataagagcaagtactgactttcccatgccctttgcgtccaccacgagtattatcggagtctgcgtcacctttgccagatggtatgacgaaccctgctcatatcttcctccaagcccgtcatataatcccatcacgccctcaagcactgcaaaatcaccatcggctctttcatctaagaaaagctgcactgttgtcttttcgtccgtaaaaaacgtatcgagatttttagatgatacgccaagcacctttttgtgaaacattgggtcaatataatcaggtccacacttatatgacaatacgttttttccgctatcctttaatagctgcagtaaagcgcaggttatcattgtttttccactgccgctttttggcgcggctatcataaaacgatttattttcatgtgttcatcctttattcatcatatatcttaaaatatcagcctttgatgatttattacaggttgtagcataaaagcccaggttaaaattcaaatgagcatatccacaccggattttctgcctgcatcagatggtaatgtcctatctgctttgagcggctgacctgcagctgcacgatatcctcatttttcacatcatatgccgacaatatttcttttatctcacaaattgtttccatggaaattgcatttatcactatacggatatgtggattttttgctttaagagcctctattatttcctttagattaccaccgctgcctccgataaatgcgtgtgtcggcaccggaagagtgtccattccgtcaggagcctttgcatttataacatggatattttcaagtccatgcttttctttattttgtgtgataagctgcacggcattttccttctgctcgatggcatagacctccatatcatcggaaagtgatgcggcctctaccgctatggagccggttccgcttcccacatcataaagcactgaatccgatttcaaatgaagcttgcagatgcttacatgccttatttcctctttggtcatcggaaccttttcacggataaatgctgcatcacttagctgcggtgtgacattttttgcaaccggattgggattttttatcatacagatatacagtccctcccttttaagttttgtgcactcctgtggcgaaagctgcgatatagtttcatccggatatgatagctggtatcccacagttaccgagcatttttgtaaaccatacctttcgtcactgcttaataggtgtccaagcatattcacatcctttacacctgacatcagcataaacgtttttgcatggtggctaatccgtgatgtgatattagaaagctttactccgtgaatgctgcatatatacgcatcgttgtaggtatcaccgactgctgccgccatatatgacacagatgaaattccaggaaggattgacacatccgcatttaattttccttcagatatttcattttttatcaccagatacagctttctgcttccactgtaaaagcccgtatctcccgagaataatataagaacattactgatttttgcagtatctgcacaaatttcgtatagataaggaataatctgttctgcaagataatacggctttttgtctatcttcgcactgtatttttctatcatgcggcttgcgccaagtataatatcagcgctttctatcgcatctgaaacagcttttgtcatgcaagcatcatttcccattccaatgccggcaagcatgatatgaagcttattatatttactgtcaatatattcacaaacagcttcaaatgacattccatcatcctgcacgctttgtcccacaatatagaccggaatatttttattttttgcggcagttattttctcaataaagcccccggccgcaccgctttttttggtgaccagacatctgatgtcatactgatcaataagcgcctcattaagctgtgtgctaaacggtccctgcaatgccagaatgtgctttcctgtaatatcattgttcatgcacaagcttatgctctcaagccccggaagcacgcgcacatacaatctttccctgacgtctaaggttttacaatacactgacagctccttgcttcctgttgtgagcagtatatttccgtctgtattgttaagtgcctttgcacatgcttcattgtcctcaaaatagcggatattatcataatctgctgatatatccgtatctcttttaagacgcacatattcgatattttctgatatgctgctatccgcctgattgtctgtaacagcatgtgtctcattaaaagcataaactgcctgctttatattttcggtaacaatggctgcatacggatgggttgcatccactatgagcttacatttttgttccgcaaagaagcttctcatgccttcgctgtccatacgccccatatgaacatgcgcgaacggattttcatgcagcacgatttcaccgtattctgttgccacacaaaccgtatgctctatgcctctttcacacagatgctctgatagcttacgtccctctgttgttcctgcaaaaatcagtattttactcaatctgatatcctctccttgtgacaagctttccgtcaattatttgtgtaccctcattgccgataaagactgtcgtaaacatgttgacctgtgcactgcgaagctcaccgagggtacagaccgtatagcttgttccctcacgtccgatattttcgacataaccgcaggctctatccggctctatcgcacgaagcagaatatcacaggctctcatcagatagtcctttctcttgtgacttgacggattgtacagtgctatgacaaaatcaccctctgcagcagccacaagacgcttttcaatcttatcccacggcgtgagcaggtcacttaagctgatggtacaaaaatcatggtttaatggtgctccaagcactgccgcaccactgtttgccgctgtaatgccgggtattaccgaaagctctacgttatcgtattcctgcccaatctcatacataagagaggccagtccgtatattccggcatcaccactacatacaagggagactgttttgccctcaagtgcctttttaaagcacagatgacatctttctttttcctgacgcattggagtggtcaaaagctctttggtctggaatttttctccaagcagctttatatatacggtgtatcccactatgacatcactcgcttccagggcgtcaatcgcctgctttgtcatcatgctttcaaagcccggccccatacctactatataaattttattcatgttaatctccatctctactaattttatgtaaccatgcagctatttgcaattttttaatgatatgagggtcaaaaggtattttgcccctcatttatgattaatcaggataccttgctgccgcaaccgttaccctgtcatatttatgttttttatagataagttctcctgctttattacattccctgctgcatgccagcactgctgcacgctcgcacacgttgtccactccaacatgctccctgacaaactgcgaggcactgaattctccctgcaccgccataagctcatccgcggtataagtgacaaattctatcctgtttctatcgcaaaattcctttattcccggttcatcttttttcacatctattgatgcgatcatgtctatatccgaaatatctatttgcagctttaaaagactttgtctgattgccctgtcaatattttcaaacgctgtatcccttctgcacccaataccaagtacaaattgtgtgggttttaagtaaatactgccatttttagggtcctttgctttttcgcatgatactacaatatcaactccgtaaacaggtgggaaatccactgtttttattgcatcagcactcatatcagcttcatctaaaaatgcctttataaggcttctgtgcttagccgggatgtgctcccagtcgaccgacatagtaaccacttttcccgccaatacctttgatgatactctggcgatgccatctttattgactattgcaagcctgcatttctttgcaaaaacatcaactgcaaatttattattgatatcagtagcggttgttataacaggtgtggcattcatcagtgctgctaataataccgcaagctcattggcacctcccacatgccctgaaagaatcggaataacaaactgccccagctcatctatcacaataacaggactgtctttaagcttgttattaacagaagaagctatagctctcactgcaataccgcatgccccgataaaaatcagagcctttttttcactcatctgtgcagctgtccagtctgatatattttgtgatatgtagccggtatttctataattttcatcggtggaatttttaatattcacatccgataatctcgagcacttggtaaaaacctccacctcatatgcacttttttttagcttataagctatgtcacatgacagctcatagcccttttttgtgaagcttacaatgcaaattttcatattttcagttccattatatttcccatatttatatattcacgcctttttcaattgttatcctttgactctacggaagccttgcgatactctgtcgaaaaatccggtgcgtaaagtcttgatttctcgtaatgccggtgagctatgacatcccccacaagcactatcgctgtctttgtgatattgtgctctctcgctgtctgctccagtgtagcgacagtgcacacgtatgcctcctcctgtggccaggttgccttgtatacaattgcagcaggtgtatctgcctcatagcctccctcaataaggctttccgtaagcttctctaaaagcccggtgcttaagtaaatcgccatggaagcgtggtgtgaggcaaaacttgctatgctctccttaggcggcaccttcgtgcgcccctccatgcgtgtgatgatgagcgactgggaaataccggggagcgtgtactcaatgttgagcgatgcagcagcgccaaagcacgcgctcacgcccggacagctctcatatggtattaaaagagtatcaagctcatccatctgctcgcgcactgcgccgtatatgcttggctctcccgtgtgcaggcgcacagtaatttttccgtcagcctcagcagctttcatgactgcgatgacctcatccagtgtcatttttgcactgttatatatttcacagctctcccctgcatagtccaaaagctctggattgacaagcgagcctgcataaattatcacatctgccttttgtaaaagacgcattccgcgtactgttattaaatctgctgcgcctgttcctgcgccaacaaagtaaaccatttttctgcctttctgctttttgcaagctcaccaaattcgtttgaatacatgatacagtctatctcaagtctgccctttgctctcttatccagataaaagcatatgcgctccatcgcataatccatcacctcataaagcctgccgctttccttaagtgcctccagggcctcctctgtcgtaaggctgtccataatgtgctttatgtattcaggcgctacaccacacttaaacgcaaatgccgtcaaaagctctatcctgcagtcagcctccctcgaatgagtgttcatgatgcctcctgctacctttataagctttcctatatgccctgtcaaaagcatcctcttaaagcccatatctgctgccatatcaattgtttcaccgataaagttggagcatttgacactcctgtccagatcatagccatagctttccttcataaagtcaagaccgtaatttcccggcgcaaccgccacataatcatatccaaacgaatatctctgcctaagctccacccttatcgtatcaataagagcctgtgagctcatgggctcaactataccgcttgtgccgagaattgatataccaccaactatcccaagccttggattaaaggtcctttctgcaagctcctttccctttggaaccgagattgtgatgtcaagtgtccccttaaaatccaaaagctcacagacctcccttacctctttttctatcatctcacgtggcacatgattgatagccgcgtttccgacaggctggtctaatccgggtttggtgactcttcccactccgtcaccaccgtctatatttatgataaccaaatcctgcttttttttgcataacgcacaggtatcggaatgcaaaatccgtacagaagcatatatataggctcctgtggtcacatccgggtcatcccctccatcctttatcacagcgcagcttacctcattttcacttctttttatgtcggtgatatcagccgtgtaagctattcccttaggtgtctgaatcgttattttgtttttagcctttccggttaaaagcatatatgccgccgcctttgatgccgccgccgcacagcttcctgtggtaaatccatatctcataatcactaaatttcctcatgaatcagcctctatcaaccagactgtaaatcagcgcattgcatatggcagccgcaatattactgccaccctttcgtccgacatttactatgtatggcacgccggtctccataataagctccttggctgcctccacattgacaaagcccaccggcacaccgattacaaatgcaggcttatatattcctttttctatcatatcgtacagctctataagcgctgtcggtgcatttcctatcgcaaaaatcacaggcttatctatccttgatgcaaactccatgcttactgccgcgcgcgttgtctttttctcctttgcaataagagcgacctcatcatcagccataaagcagtgcgcctgtccaccgaattttgccaggtattttttatttatgcctgaaagagccatgttggtatcggtcactatatcagcgccctctgatatcagcctttttgcgatagcaacggcgtccttagagtatttaagcgtctgtatataatcaaaatcagcactcgtgtgtatgactctttttgttatcatctcctgatcagcaggcagcgtaatctgcatttcagacagctcatgtgaaattatctcaaagcttctcttttcaatctccatcggctctaactgtttaatttttttcaatacactcacctatcactttcaataatcttacattttcatcataagtctttactgccacacgaaaatacccttccgaaagccccacatagttggagcagtcccgtatcagtattcccttattaagcagtatatcatataatggaagcttgctgtaaaacagtatgaaatcagcatcacttttatatacattaaaaccaagcttttttagtccatctgacagcagccttctttgtccgctcacatacgatgccgtttctttaatatactctgattccataatgcatgcctctcctgccatctgtgccaggacagacacgttccactccggcagatttctttgaaccttttgtcttactgcctcatttttactgatcatatatccaagccttactcccggaatagcaaaaagcttggtaaaggctcttacaacaatcagattgtcatagtcacataaaagtgacaaaacagaatattttttttcacaaaagcccatgaagcattcatctgccaccacataaatactcttttctttgcaatgccctattatttgcttcatgaaagtgctgtctgcaagataccctgtcggattgtttggatttgcgataaaaaatatatctgtatcatctgtaagcatatccattaaagcatcccgccgtgcagcaggagaaaaatcactctgctcatccagcaggaaatatccgatatcacagccgactgcacgaagcacatgctcataaccgaaaaagcctggggccggaagtactgctttttttggttttatggcatgagctatcgccataaaaagctctgaggctccgtttccgggaattacatcctcgctttgtatgctgcaaccttgctgagtgaaatactctgatatcgcttttttaaggccactgcacgccatgtcgggatatctgtctgcatacgaaagtgcatcactcatagcctctttaacagaatgtggtatgccaagaggattgatatttaccgaaaaatccatatttactttattgttgtatatgtcaccgccatggatgcttttcattcaagtcctccatcaattcttacatcaattcttccatattcaaagcaatattaaaacaagactcataaccgccacagataaaagctcacacaaaaacgcagtaatatacatcagcctgtttgcacgctttatatcctcatactctatctcacgcagaccgtctcctatgtattttttcttcacaagcttcccaaaatacactgcatcacccgcaagctgcacccttaaagctcccgcacatacggactctgtctgggctgagtttgggcttgcgtgattgaaacgatctcttttaaagatgtggtatgcatttttgccatcaaaatgcctaccaccgataaatgccgcagcaatcatcagatatgcactgattcttgccggtatgaaattgaccacatcatcaagccttgcagcaaatctgccaaaatacatatatttatcatttttgtagccaagcatcgaatccatcgtattcacagccttgtatacaaagccaagcaccggcccgccgattgccgtataaagcataggtgcaatcactccgtcagatgtattttcagctatcgtctcaactgccgcccttgtgacacctgctgcatcaagcacagatgtatctctgccaacaatcatggaaacagcccttcttcctgcatcaactccatctgtccttagcgcatcatacaccctcatgctctccacacgaagacactttgtggcaagaatctgccacgtcatgacagcctctgctattaccccggcatacagatttatgctgtatgcagccacaataataattaccgacattgcaaaagttgcaaaaattacagtaaaaacaagaagcatgcctcttttatattttattagatttaattttttttcagagctattatatccggcatcacaattaagcctcttatcgagaaaagaaatgagtgagccgataagcctgaccggatgcggtataaaatgcggatctcctattaataaatcaagcacaaagcctgctataaatgcaaaaatatgataacacatatgttagtccttcttaaataaatcatagcgatatgggcactatttcattaaacacaatctcattgccctcaaccgccacctcacacgagtagccacagccgttttttacctgataatcatagtaatccatatcacagtaatggctcattatcgccatgatagtccctccatgcacaaaaaatactatttgtatctctttatcaggcatagccctcttaagctctaatgcctgtgtgagtgccctctcaaagccacatatacttcttttacaaaactcttttctgctctctccgtttggaaaggcaagtgttccaccactgtcaatccacgcctgatatgagtccctgaaacggatatctgtgctaagttcattatagctttttagctcccactcaccgaaatccatctctgcaaactctttaacggtatgaattttatggtgctgtgcgaccggcaaaataatctctgccgtctgtttacagcgcctcattgggctggtaataattatctgctcctttaagctatttttctccaaagccttgtatacaccattatttagcgcattttctagttcaaaaactccggcttcatcgagtggctcatctgtcctgcccagatatctgtgctctctgtttgagacagtgcagccgtgtcttataaaaatacagtttattttattttctgaccgattccacatattacgcgaactacctcgtctgctttttttgcaagcagtatctctgctctgcctgtctgctccctgtactctctctcaaacgcatcaagaggcactatgccgtttccaatctcatcagcaatgactattgtatccttattttcctctgcaaactgcataaatttcaaaatatattcctgcagtggaagatttttctcaagcacagccctgataaaataatggaatttatctattatgagtatactctcatcatcgacggcaaaatcccatggccattccatatttgatgccttatcattgcaggcattattttttagaaaaaagcagtcgtacacatcatatttttctgttttttctatcatattttcgagcacataatcaagctttccctgtgccactccgcctatcacaagcttcatattttctccaattccaaagtttaaaattcatagtacaacttttatcaaaattcttatccgtaccattcctatattcaaaacagatatactaaataataaaagagacaccacccagagccactgccatggcgcactcacatatacacacaaaataccctgccgtatcgcctgtgatgccgccaagctccttttttgttttcacataataataccaaaagctaagtgctgccgcaatgatcatagccaccgcataaggcagtgacacaataaataaaacagccatacacagtgcaagctggatgtatagtactgccctcacgatcgttctgtgtgcagtgtccgcaaacataaataacagtccatcgctttttgccgatttaaatgacacaacagctattccgcttaagcaccttgagatgaaaaagcctgcacaaaaaacaataaatgctttatcattcattatctgagaaaaagctcccatgaataataatccgtaggctgcaatcattataacggcaaacgctcctatatgtgaatccttaagtattgcaagcttttcctcccgcggtttgtatgaatgaaatgcatccattgtatccataaaaccatctatgtgaaagcctcccgtaaccgctatcggaatgagtgcgcctatgcatacatagcagatatccgccactccaaaatgagagtatatatatctccaaagcataagaagcagtccaatcacagctcctatccacggaaagaataccagcatgtacttcatgtcatcatcattccatttaaattgtggcataggtatctttgaatacatggaaaaagatactatgcacgaccttattaacttcataatacacttaacctccacactgcttcacttaaccgcaaccggaatgcccgcaaccacctcaacgacacgctctgccatcgcagcaagccctctgtttacaattcccattgcctttatgtaattcatcgttgattcatcatagcatactccgtcttcaaatacattgtttgtcacaattacaagctccgcaacattttcacttaagatacttacctcttttaacacctttttactcacacggctgatttgagccgtctcataatccttcattttttccgtggcatccaaagcctctttttcggcttcggcagcctgtataccggaagcatctacaggtggaaacatctcatttgccacaaggtttgacatacactcaagcagtgctgaccgcccggtttttaaacagttttcagattgcagcttagaaaccgcatttttgatatcacgaggctgctcgatggtaataaagccttttccgacacgaagccttctgtgcctgtctatcttccgctgcccctcatcatcaaatacctgcatggtggcaatgtaatatttttctttgtatcccttttcatttgacacgtgacaaatatacttttctgcatatgctgatttgccgctgccgctgccgcctgttataagtgtaatcatctatacgtacctctcatactgtgataccgagatatcgtcgaaagttgtccgtcctttgtatacgctaagtgccatatccaaaagcgcgaacatcatcacggcacctgttccctctccaagcgcaagggatgctcttatgacaggccttacggaaagtgcctcacacaaaagcgccactgcaggctccctgccctcatgggatggaatgataaaatcagtaactccggaaagaagccttcctgctgccaatgctgaaaccatgcttatcacaccgtcgagcataacaggaatatggtataatgcaccgcctatacacactccgacaagtcctgcaatatcgagtcctccgactgtcataagtatctcaaaggtgtccttattatataaatcatacttttctattgcgctctcaattacacggatttttttctcaagcccactgtcgtttaggcctgctcctcttcctgtcactgtggccacatcgcaccttagcatggcggctgccattgccgcgcttgtggtggtgtttcctatccccatctcaccggttgcaataattctgcagccgtctgccttacacccacgcactatttctatacctgctgcaatcgcttcaagtgtctcagcccttgtcatggcaggctcttttgcaaagtttctcgtgcccatgcgcacctttctttgaagcagccccttaacactctcgtcactgtttattcctatatccacaggaattgtatcagcccctgcagtcattgccatgcgtccgacagatgaagccttccttgccatggattttgcaactgcaagtgtcacctcctgtccggactggctgatgccctcagcaaccacaccattatccgcacacatcattatgaccgccttttttgagatatctatattttcatctcccaaaacagcaccgattttggccgttaatagctcaaaatcacccatgccgtcgagtggctttgccaccgaatcccagtttgagcgtatttttttgtacatttttgcatcaggtggcgttatttttaatttctttaattcttcaactgtaaaatggtcagaaataatattgttttcaatcatattttgcctcacgaagcatgccgtacactgcatccatatccagatactccctcagtgtatccgcaagcctgtcatactgtttttccttaaagctcttatagcttacaatagtgctgtcattcacatcaatgccctttttatcggcaatataatccactatcactctggcggcctctgcagtatcaaaaatgccgtggatgtacgagccatacacatttctgccatcagatatgacattatttaactcatttttcctgtcaacacaagccccctgctcatctgaagctgtgctatatgcgctcttacccatatgtatctcatagcccaggaagtgacagcctgaaagcctgctcaatacaccatctacatgtgctatttcaccgcttgtctgaagccgtgtcttgctatcttttagaacggtatctataggaaggagctccatgccacgcatatatcctccctcctcaacaccgtcggggtcggctattgaagccccaagcatctgatagcctccgcatattccaaaaacaggtatctcacaggagagttttttgacagcggcctcgagtccgttttgtctcatccacaaaagatcccccatcgtattcttgcttcccggcaaaaatacgatatccggatgacgcagctcatttaccgttgacacatacctcactgttacttcggacatctgctcaaagacattgaaatcagtgaaatttgatattctcggatatctgatgaccgctatatcaataagcccatctgtctttttgtcaaagcgctctgtcaggctgtcctcatcctcaagctgtacatccatatatggcaccactccggtgacaggcaccccgcctctctcctcaagcatctgtatccccgggtcaaggatcgtcttgtctccacggaatttattgataataagcccgcagacacgattcttttcctcatcggttaaaagcataagtgtgccaagcagctgtgcaaaaacgccacctctgtcgatatcacccacgagcagcaccggtgcatccaccatatgcgcaagccccatgtttacaatatcattttccttcaaatttatctccgccgggcttccggcgccctcaatcactatgatatccgcatactcctcaagctttttaaatgccttttttatatccggtatgagagttttcttgtatgcaaaatactctctcgccggcatgttcttaagcacccttccgtttacaatcacctgtgagcctgtattatttgtgggctttaaaagaataggattcatgcacaccataggcttaatgcctgctgcctcagcctgcatcacctgggcccgtcccatctcaagtccttcgtctgttatataagagttgagcgccatgttctgtgatttaaacggtgccaccctgtatccgtcttgtctgaaaatacggcacaagcccgcgacaagaaagctcttgcctgaattggacattgtaccctgcaccataattacctttgccatatatatacctgctgtctgaatttatgtggtagctttatcatgaatattaaactgtagtgtgaacagtaacttccttaaagctgtgccaattgttcctcaagaaaatgaatttttataatttttcctgtagagactgcatactcataaagcctgctgttaaactgctcatacgtgccaaactctgttctgtcacatataacgccctcgcatgcatcaataagctcctttgccttttcaataagggcatcgtctacaggctcaaagcttcttgcactgacaatctcagcagaaagcgcctttgccgcaggataatccagatcattttcatagatgattcctgtcgcaaacgggataccctttcgctgtaagcttctgaagctttttctgcccaggccacctcctgctatgacaaataccctcgcaattccatccggtttttccagctctaaatcctctcctgtttcatcaaagcttcctgccgtaattccaaaaagacctgaaacatattggtcagtaaatacctcctcgggagttccgtatctgtccacataactgccatctatacacatgatatggtctgacacacgctttgccatatcaagctcatggagcgacatgataaccgtaagattcttctgtcttttaagcctttggagtattgataaaaactcaagcttgtactttatatcaagatacgaggtaggctcgtctaacactataatctccggctgttgacatatagcccgtgacagcataacccgctgtctttgtccatcgcttatctttgtaaaatccttatcttttatctgtgatacattgaccagctccatcgcctcatccacagcctttttgtcctcatccgaaagtactccgaaccggcctgtgtatggatatctgccggtcgcaaccacatcatagcaggtcataagctccgtctttagcttatcggtgagcacaacagccattttctttgcaaattcattgccattcatcgtcactacatcacttttatcaagatatatcgtaccgctcacaagcgaaagctgtcttgcaatactttttaaaatagtcgatttaccggcaccgtttggcccgattaatgtgagaatctctccccttttcagggaaaaatcaatattttcaataagcggcctgttatcatatccaacggccagcttttgagcagtaaaataatattccatcagacatttttctccttgctgcgtcttatcatgataaacagcactaccggtgcaccaaatactgccgtaaccgtgctgatactaagctccgtaggcgcaaacatcatccttgcaagcaaatcacaaaacaggcagaacaccgctcccccaaggaagcaggccggtatcatatatatgggctttgtgctctttagcatgctttttactatatgtggcacggctattccgacaaacgatatcggtcctgcaaacgccactatacatgcggaaagcaggcttgaaagcagaaccagaagcacccggatactctttatgtttacacccagatttacggcatatgactctccgagctgatatgccataagtggctttgacatgagaaaaacaaaaataaatgtgattcccactacaatgctcatcaccccgacgctgtcccatgtcatgcccgaaaagcttccccttgaccagttatgcaggtttactatgtcggaatcatctgcaaatgtcaccacaaactcagtcaccgcagagcatatgtagccaatcatgacaccgctcaccacaagcattgacatgctgcttacctttcttgaaatgataagcacaaagcccattgaaagcattgctcccaaaaacgctgctgcaatcatggccagtgagctcacacgtatggcatttccaagtaaaaataccataacaagtgccacaatcatcttagcccccgatgatatgccgagcacaaaaggtcccgcgattggattatgaaaaaaagtctgcaaaagatatcctgcaagcgctaatgccccgcccagtatcatcgctgcaatagctcttggcatgcggatatcccacacaatacgtcctaccctgtctgagtggtcataaagtgtcgcaaatgcagccttaaacgatatgtgtacagttcctatgcacacattcatgataagcaatataataattaagattataagaataataaatgttgtaaaacaccttatttttctggttttttccatgttatagctccgatttttatctttttgtgctattgattttcctgttgagcttaaacagatatttcatgccgctgtcgggtgcacctgtaatcatcgaatgcatatcatcaatcatatatccgatggacatagactgctgatacatatcgttcgtggtgcaaaatacattgccgtttttgactgccctaaaatcagcaagcaccgggcacttgtccaaaagctcattcagattcttcacaccgccgtctatcgcactgttatatatcagatagtcagcatctattgctccattgtagaaatcctctagctgcatattcatggttgacctgcctgtatcgtcgtcatttgatgcatcaaaaatatattttccgccggcaagcgaaatcatctttggcacataatctgtgcttttgcgcacctgaacctgtccattggatgtgatatagaaaaatgcaactgtcggtctgctatcatcatttgcagcagtatctgtctttgcgatgcgatttacaatatccacctgctcattaaagagctcatcggccttttcatcccggtctgtgagtgctccgaaaaacttcacccactctactctgccgagcggctcctcctcatagcttgagtactcgattattgaagggatatcaaagcttttaagcttttccgttacctgcggcgaatgggtaatcatagtattttctatggcaagtgaacagttttctgacaccaaaagctcataatcgggctttgaatatttgccggcatatagcattctgccactttcaagagcctttcttgcactgtcaatgtaccagccatcactgtcaagccccgaaaatttaatagtgtccactgcatcaagcttgtcaaacatatccatcacccctgatgcgaccagatacaaatcacttacaggctccttcaatacaatgatatccttgtcaatatcctttggagtctttctgccctttggcacggtaagtatttgggtaccgtccttcgtagtaagtatcttgtatccaccctcataatagtcaacagaaaaattctttgcatataaaagcttcatactgctcttatatataagaccgttttgtgcctctgcctcagccttcgattcagtattccctgaatcggaagaaggactgtcacagcctgacagccagaacagtcctataattgatatcaatatatatataattatcttttttcttccatgcatagcttaattattctccatcctcaccaagcacctctgtagcagaatctgaatggaaggtgagtgtgtactcaacctcgtgcggcttgctcatagcaactgtatctccgataacctgcataggtgtatcaagcttaaccggaatttcaaatacagaattgccgtctgtatttacaggcatgtatttctgtccgtcaactatcatatagtcatagtttggactgctccactgcactgttgcaatagcagcgccaccgcttatagtcacctcagccggtgatgcaatgctcgccttaccgcttccgccctcgaaatcgagattgatattgtatgttccgtcaggaagctcttttcctgcactctcagatacgcttgcatctgcgtccgcaggtgtggcatttgagacctttaccttgtggtcataccatttgccctttgtaccgataagtgcaaggtcaaattcctcatccaaaacaggaaccggtatatcaaacgcattgacctcctcagttgtgccatcgccataatcgacagtctcaacagttggctctaaaagctcagccttgtcctttgaggcatcctttgctgttcccaaaaagagatttacaatgtgtgtggatgtgagagcaacatgtattgttgccttgccatccttcacggtgagtgtacctttgttgtcatatgcatcattcacatgaaacattgagctgtctgtagtaaactctgctgtatatgtaccatctgaaagtgctatcttttctgttttttcagccttttttgtgctctctgtcgcgttctgcactgcttttttgctttctgtttcagcttttgcattcttattaccgcaggctgccaagctcatggcacaaaccagtgtcattgcaacgatataagtaaacttgtttctgaataattttctcatgtctgatatactgctcctgttattttatagcttccccactatacatttaagtaactgctacttgctcatagcagccgctgtatgctcaacataaagcttctggataccctcaatctcaccaagtccgttaatctgtgtatcgattttatcaaactttcctgatgccttaaactgtgaaagccatgaatcatcatcacttcccgccatatcattgttggcatggtctcctgcaacaaccataagcggacgaagaatgacattcttgtaaccagcggctgacaccttctcaatgacagactcacatgatgtatcctccggctcaccctctacagttccgataaatacgttctcataacccaaatctgtcatttggctctgcatctggctgtatgaaatctttgctgtatggcttgttccatgtcccataaatacaaatgctgtgccctcttcctttgcagcatcaaggctgtcatagcctgccttttctaccgcttcctctgtaagaatttctgcaacagcctttttatcctcatttacaactgttgcatcacttccaacctcaccgaggagtggctctgcaatctttacagactcaaatttatccttatacttttctacagcctctgaaagctcatcatactctgcgccatgcatcaggtgtgtaggctgtaccacaagattctttacaccatttttgactgcacgctcaagtgcctgatccatattgtcaatcttctcgtcatctcttgcctgtacatgattgatgataatctgtgctgtgaaggctcttctgactgaccagtcaggatttgcagctgctattgcatcctccacacccttgatatcagccacacggctgtcgttgaaggatgtaccaaagcttactacaagaatctcgttctcgccgatatcatcctggtttctcggatcatcctttgaagcatcgcctgtatctctgccgaaatagtcaggatcagcattttctccctctacaagctccttctgtgcgtctgtgagcttgtcccaggcctccttagcctccttgcactgcttgtctgtatcatctgttctctcctgcacgtagattgcatcgattaaatctgccacatgcattgctgcctcctgatctgcgtctgcgcttgtctcactctctgaagtcttagatgcctgtgtatcattctttgcatcatctgccttgctgccacagccggtcactgctgtcatagccataactgctgccatcaggactactactaatttctttttcatgttttctccttttcattctccttgcagcaattaagctgcacatgttttaaatatgtaagacgaaaacatttaaagcatcaaaaataaaagctctttgtactattatgtcaaagagctatacatgtcaaaatccttctaacacagactatacggctatcataaccttgtctgtaattataattatttcatcacgtacagccagttactcgtggcttgaaacactattgtttccgtacaacacaaaggcaggtatcccggcttatatatcattgcttcggccgtcttcccggttgcccagtgacttattggccgtcactccttaattacggtgacgagttcgtacaggatttgcacctgtttcccttttcaccggagccagcttcacatcgcctgtcataaatcaaattcaaatgcttgtctgctccgacacctttatgctacatattcagtttcttcgtgcgttgcttacgcaatcgcttgaattattatattacaacttgtaacattattcaacagatttttatcagacgctttacagacacatttacaaaagcggtgcaaaaagctgcaaaatactctgcagcagcctgcctgcaaatgagatatcatttgtgctttcctcatacacctcctctgaaaccgcaaacgtctctatcgcatcctcttttatttttccgatgcactgagtcctgtacatgtatacaaaatcctcaaaattccagtacatgctcctgaaatccagattgcatgtgccaactatcgcagtatcatcatctgccactatacacttagagtgtataaagccgggtatgtatagatatatccttacccccgcctcgataagaggtctgaaattggcttttgtctgcagataaatgagctttttatcgggaatcttaggtacaacaatacgcacatcaacacctgacctggctgccgatatcatagcatgtgacagctccgttccaagtatcagatacggtgtaaaaatataaacatattttttagctcttgagatgatactcacataaagattctctcctacatcatcatgctcaagtggagaatcgcaaaacggctggacaaaaccgcttttctctgactggctgaaggtattgtgtggattcagatattcatcatgcacagcattgtccttattgatataattccacatctcaaggaacatcgtcgtgaaactgtttacacactctccctccacacggataccggcatccttccagtaaccaaacctgatttttttgttgatatactcatctgctatattgtaaccaccggtatgcgccacacgtccgtctatcaccagtatcttcctatgatccctgtcattcataattactgaaagcatgggcttatatggattgaagcgtctggtctgtattccgatgctctccatctcctttataaaatgcggcggaatggcatttatgctgccaaaatcatcatatatgattctcaccacaactccatgctttaccttttcttttagtatatcaagtatctgatcaagcataacgccactgccgattatgaaatactccataaagataaacttttcagctgaccttaaatcttttaaaatgctctcaaaagcctcctcacctgatttaaagtactctgtgcagtcctccgcatacagtggatatttctgattttgagtgataagcctgctctgtctgtatgcatccatgtctgtcagtctgagtgtctcatttagcagctcgttttcaggccgaagcggcgcatatgcttccacaattcttgccattcttttctgtgtcttcgacgtaagctccggtcttccgaaaaagaaatagcacggaataccaacgattggaacactcagtatcaaaaatatccatgacatttttatatacattttcatccgcctgttgacaatataaagcgaaagcaatatggccgccacatacagcagatcctgaaacaccctgctggcaacagatgccgtataaaacaaaaagaaccaccatatcatctgtatgattattattgttgaaacgataaatagctttgaaagcagtttttgtaatattttcctcatctaagccctaccatgaaattacaattatacaacctaatatttcctatattatctataataaatctctaatacatattataatattcccaccaatttatcaacatttataatcccccacgagcctttgtgactatcccctgccctgtcacatgtattatacagggctagcttaaccgcctccggtctcatatttggatttttttccaatagaagtgctatggcacctgacacaatcggtgtagccattgaagtacctgtttttcttacatatgtgccatccctcgttccaaggcttatgatatcatgccctggagccagaatctcaggctttacaatacaacagtcggtcggacctttgccacttcttatatcatcaaagcttcctactgttattatttttcttgaaattcccggcacagttacagaaaacggtgccgggccgtagttgcccgctgctgcaacaactaccactcccatatcccacaattcatctatcagcttcaatatcttaatacgctctgctgtatcagaacatggcagatatcctacagagaagttgagtatttttatattaagtctgacacagttttcttttatatacttaagtgcacgaattgaatccgacgtctgtcccatgccaagataatcaagcaccttaaacacatatagtcctgcccccggagccatgcctatatctgcagccgataatatcccgcacacatgtgtaccatgcccgttatcgtcataacatgtctcctttccacccacaaaatccataaagtgctttatgcacccatcaagctgtttgtgtttaaacacacccgtatcaagcactgctatattgacatttttaccactatatccatttttatataccagatttgcatttatactatatttcgcatttttcattattattctattttttaatttagtatatgattcgttttcacaatatgtcacagatgcacctgttttgccttacatcatatcaccttactataatttcatatattaaaaggactgcacctgcgtgcagccctttacttggatattattgtcatactttaacgtatattaattaatcctcttttacatccttcatagagaaactgattcttcccatcttgtccttgccaaggcaaacaacctttaccttgtctccaagtgtgagtacatcctctactctgttgattctctcttttgcaatcttagaaatgtgaaccattccctctttgccaggagcaaattcgatgaaagcaccgaactccttgatgcttacaactgttccctcaaggatctgtccctgctcaaaatcagttgtgataatcttaatcatgtcgattgcctttgcaatcatctctttatctgttccgcaaactgaaacagcgccatcatctgtgatatcgatcttgacaccggttctgtcgataatctcgttgattgtcttacccttctgtccgacaacatcaccaatctttgatggatcgattgtaatctgctcaatctttggagcccactcatttacttcttttctaggctcagcgattgccttgctcatgacctcatccatgatgtagagacgtgcctcacgtgttctcgcgattgcctcctcaacgataggtcttgtaagtccgtgaatcttgatatccatctggatagctgtaatacccttatgtgtacctgtcaccttgaaatccatatctccgaagaaatcctcaagaccctggatatctgtaagtacaaggaaatcatcatctgtatcgcctgttacaagtccgcatgagattccggcaaccatagccttgatcggaacacctgcagccataagtgacatacatgatgcacatgttgaagccattgatgtagagccgtttgactcaaatgtctcagatacggcacggatagtatatgggaactcctcaatgcttggaagtacaggaacaagtgccttctcagcaagtgctccgtgtccaatctcacgacgtcccggtccacgtgatacctttgtctctcctacagagtatgcagggaagttatagtgatgcatatatctctttgttgtgatattagcatcaagtccgtcgattttctgaatctctgataaaggagcaagtgttacaacatcacaaatctgtgtctgtccacgggtaaacattgcagatccgtgaactctaggaatcaaatcaacctctgctgcgagtggtctgatctggttgattgcacggccgtccggacgcttatgatcctttaaaatcatctttctgacagtcttcttctgatactggtaaatagcctcaccaagtactgcaaggtactcctcattgtcagcgaaggcttcctctaactgctctgtgatagctcttatattttcctcacgcttctgcttctcatctgtgaatactgcctcctccatctgctcaggagtaacaattttcttgatatcctcgaacatctgctcaggaatagcacaactctcatactcatgctttggcttgccaatctcatcacgaatctgatccatgaatgcgataactgtctggttgatatcgtggcacttgtagattgcctcaatcatctgatcctcaggaatctcattggctcctgcttcaatcatgatgaccttttcctttgtagaagcaactgtgagctgtaaatcgccctcatcccactgcttctgtgaagggtttacgataaactctccatcaacaagtcccatctgtgtcatggcacatggtccgtcaaacggaatatctgatatatgaacagcaagagctgtaccgatcattgcaactatctcaggacggcactcaggatccactgacatgacaaggttgtttaatgtaacatcatttctgtaatcctttgggaaaagaggtctcattggacggtcaattacacgatctgtaaggatggcgttctcagatgcctttccctcacgcttgttaaaaccacccggaatttttcctacagagtacatcttctcctcgaactcaacgctgagtgggaagaaatccacaccgtcacgtggcttgtcagatgctgtagctgttgaaaggactgttgtatcaccatacttgataaaaacagctccgtttgcctgagctgctactcttccgatatctacagtaagagtcctgccggcaagttccattgaataacttttgtacatattaattctccttaaaattcttttgcagaagtgtattcctcttccgaaactactaaacaatacatgtacactcatgcactctttagtggtctcggcttacttctgcttttcaaaaaacaataataaaaacaataatagagcggaataataattactccgctctaaagaaaatactattttctgagtcctaaacgctcgataagtgaacgatatctctcgatatcaatctccttaaggtatgcaagtaatccacgtctctgaccgatcatctttaacattcctcttcttgagtgatgatcctttgggttctgtttgaaatgctcagttaactctgcgattcttgctgaaagaattgcaatctgaacctctggtgaacctgtgtcatttggtgttctaccgtactctgcgataatagcctgtttcttttcctttgcgatcattgttgatcctccttatattataatgcgccctgataactgtatgatgctcagcaataggtcggagtgtccaactaccgaacatgggcaaaaccatacctatgcagtatagcatagtaagcatttgttgtaaactgttttttttattaatccggcaaatatcttgtgacacaaatcggatttctgtaatatgcatttgaaaccttgattccatcacgcttgttgctggcatgtacaatctgtccgtttccgatataaattgcaacatgtgagatactccttccacttccgtagaagaataaatctcccggctttgcttcagatgcactgatttttgtgccgtatgaaggctgtgcttttgatgaatgcggtaatgagattccatactttccaagaattctcattgtgaagcctgagcagtcaactccattctcaaggcttgtaccaccccacacatatctgtttccgacaaactgtaacgcatacgatacaacagatgtccttacatctgatacaccgtcaccatacttcacctgctctattgtctttgctgtaggaagtgcctgtgccagtgtcacataatcctgtgatatatatcctaccgaatcatccacacttatctcaacccagccgtcagcgacagaattaactgtgaatgcctctgaatttccaacctgtgaaagcaccgcagcctctgttgacttctctgcacgcacattcagtgtttcagtatttacagtggcaacagttttaatctcctgttctgcaatagcctctgcctcatctcctatcacaagatactgcttgcttacatatcctgtcactttgcctgatgtaaccttataccagtctccggcatcctcaagaagctcacaggcattgtgattggtaaggatacctaccacttcactgtctgtcgaagcctcctgtctgatatttaagtttccgctgctgataactgacataccaagatttgtgtaaccacaggtctgtgcggctgtcggtgtctgggatgcctcatttgcctgttctgtctcctgtgcagtatcgccagcctgtgcaccctgagcagatgcagtaacaacattgctgtcgttttgcgctaccgatacgtcagctccataataagtaagagccgatgtaacccctgctgtgagaagctctgtggcatctgccacatctgtcagattaagtgcaacacccgcattcactgatctgtttttatttgcctctgcctttgttgtcctggcatccaccgtgctgcttgagctcatagataccgctcctataataatagcaaacgctacaacgcctgctgcctgtcctaattttaacttgtttttcatatagcctccgatttatgctatcgataatccacggtcacgagtatatcataaattgttaaaatgtcaatatttctttgtaacatttctgtaatatttgttattttttcgttattttgggctatttagcaaaaaaacagtcacactaaaatgtgtgactgcctgcataattgattgtaaaattgatatctgcgctcatctggctctttaacgcttctattgaatcaaacttcatctcaggtcttacgaacttatgaagctctaccatgatatcctgtccgtaaacatcctgcccaaaatctatgatatatgtctctgcaccgattggatttttgccctctatagtaggcttgcatcctatattagttacaccaaggtaccagttgtccctgacaagaactcttgacatatacactccctttggtggaagcagcttatcgtgcggcactgaaaggttgactgtcggaatgccaatagtcctgcccagtgctctgccatgcactactcttccttttataaaaaagggatatcccagcagttcatttgcctttttaatatgtcctgccgcaatctcctcgcggatataggtactgcttatatccctgtctccatcctttatcttgtccaccacaataagctcgtatccaagctctcctgccatcgcagaaagcagccgatggtctcctgccctgttgtgcccgaaacggaaatcatctccgacaatgatacacttgacattaagacttttaactatccatctgacaaacgcatccgcctccatcgtcatcacctgtggcacaaacggacactctatcagatagtcaatacctgatttttcaaacacatactctttttcatcgtttgtgattataacctttgactcaacgccaagtacctccgatttgggaggaatgtcaaacgtaaatatgatgcgcttgtagccatgcagattgctctgttcaatttgcttttccatcagaaattcatgtcctctgtgaagcccgtcaaactttccaaacgagatgacggacggctccttgacatgaaaatccagagttttgcttatatattccataatatctgtatactattctattccataaaaatcttaaccggcttaaactcaccggtctcatcaagatacgaatacaccccgacaaatatgccctcatgattgtatactctgtatcttatatcagagtcagcactgttttttaaataatccgtaagcactgccggaattttatttccatttctgacaagcttatcagcatctgaagcagcatgcactgccggcagattttcgaatactccgtcaacaggcatcaccatatcaaagcagccttcatccacctttgactgaatctgtgaaagtgtaagtgcatgctctaagtcaaagcctgctacccttactctaagcagtgacttcatgcagccatggcagcccagcctctctccgatgtcattgcacagtgtcctgatatatgtgccctttgagcagtgcaccgtcatcgtaatctcaggcaaatcaatgctttcaaccttgatatcaaacacctcgatatccctggcttttctctctattaccttgccctctctggcaagctcatagagctttttcccattgacctttaaagccgagtacataggcggcacctgcttttgcctgccaacaaactgtgatataacatcatacaccgcctgctcagtcacattgaccttagcctgatttaagacctgccctgtaatatcctgtgtatctgtctcctgtcccaaaagcagcacagctttatagaccttgtccttatctgtcaaaaggtcacacactctggttgcctttccaaggcagacaggaaggacgccttgcgcatcaggatcaagtgtacctgtatgaccaatcttcttctggtggaatatgcctcgaagctttgccacaacgtcaaagcttgtatagcccttttccttgtatacattgattattccattaaccatctgcccaagaatctctccctaaatattatccttaattgccgtaaggattcggtctgttgccacctcaagcggtccgtcaatcgtaaatccggcggcctttacatgtcctcctccgtcaaataccgacgcaacctttgccacatcgtaatcaccgtttacgcgcaggctgcccttgtaggtaccatcctcattttcgtagagaaatacagcaacctttatatcctttgttacgcgcagctgatttacaataccgtcgagatgctttggaagtacgttgtacttctccatctcagcacgcgatactgcagacaatataacatcaccattcagatacaaagcagcattcaaaagtgcctgccccataatcttgttctgggcaaatgtctttgtataaaatgtatcatcgattatccttgaataatcaatgcccatctccatcagggagcctgctatatccatagtcttttttgaagtgcatgaatactggaacacgcctgtatcatgcaccatgcctgtgtaaatacactctgctatctgtattgtgatgcgctccttcggcagaagctcgaacaccagctcacaggtcgagctcgcatccggaaagatgtaatttgcgtctgcaaaggccccgtttgtaacatgatgatctatgcaaagtgtcctttttgcagactcaaaatacttagctgcacttcccagtctgcctgtgtcactgcaatcacatgctatgaacagatcgtatactgtatcatccgcatagctgctgtcaatctcatctgctctttgcataaacttaaagatgtttgggcttggctctaaataaagccttgcctttatatcaggataataatcctttatgtagttgtatacagcaagtgttgagccgacacagtcgccatccggtctcacatgaccggaaacagcaactgattgtgcatcctttaaaatagaatcaatctctgtcataatcaatcctctttgttaatcctctttgagattttttgttacttcatcaatctttttagacatctcaacaccatactctatagactggtctatgataaatgtaatggcaggtgtatttcttaaattgatgttctttgcgagagttctgcgtatatatccctccgctgacttaagtcctgcaagtgtatcagcctgtgatttcttgtcaccaagcacactgatataagcctttgctgtctttaaatcaggtgccacctcgacagcaacaacacttgtcatgggattgatacgcggatcctttatctcaccgcgtatgatatttgacagttcacgcattacctcttcgttgatacgaatattttttatgctgttctttctcatataatcccgctttctttttatattaaactgtaactatccgaatagttacattaattcatgataacaaatatatgattatctcggaacctctaccatcttgtaggcttctacaatatctaattcctgaatatcattaaatccgtcaaatacaagaccacactcatagcctgtcttgacctccttgacgtcatccttgaatctcttgagtgaagcaaggtctccctcgaatatctgctcaccctctctgctgattctgacacggcagcctctctccataaatccgtcaagcacatatgaacctgcaatgtttccaacgcctgaagccttgaaaatctgtctgatttccgcatgtccgataaccttctcctcaaatacaggatcaagcatacccttcatggcagcagatacatcctcgatcgcattgtagatgaccttgtaaagtctgatatctacgccctcacggtctgctgtagccttggcaacaggatccggtctgacgttaaagccaatgatgattgcatttgatgctgatgcaaggataacatctgactcgttgatggcaccaacgccgccatggatgaccttgaccacaacctcctcatttgaaagcttgacaagactctgcttaacagcttcaactgaaccctgtacatctgcctttacgatgatatcaagctccttcatattgccggactgaatctgtgagaacagatcatcaagtgacatctttgcctttgtatcctcaatgagcttattcttttcctctgaaatatatgtgtcagagaatgcctttgcctccttctctgaatcacatgccacaaatgtctctcctgctgaaggcacactgtttagtccaagtatctctacaggtgtagaaggcttagcctcctttactctgcggcccttgtcatcaatcatggctcttaccttaccatagctgcttccgcatgcgataggatctccgacatggagtgttcctttttgtacaagcactgtggcaaccgcaccacggcctttatcaagctgtgcttcaattacgagacctcttgcgtttctatcaggattagccttgagctcgagcacctctgctgtgagaagaatcatctcaaggagattgtcgataccctccttagtatgtgcagatacaggacagaatattgtgcttccaccccaatcctccgggataagctcatactctgagagctcctgcttaaccttgtcgatattggcacttggcttatctatcttgttgactgcaacgataatctcaacacctgctgcctttgcatggtttattgcctcaacagtctgcggcattacaccatcatctgcagcaacaacaaggattgcgatatcagtagagtttgcaccacgcatacgcattgctgtaaatgcctcatgtcccggtgtatcaaggaatgtgatgttctggccattgattgatacaacagatgcaccaatgtgctgtgtaataccacctgcctcacggtctgtaacacgtgtctgtctgatggcatcaagcagtgatgtcttaccatgatctacgtgacccattacgcagactacaggtggacgaggaaccatcttgctctcatcctcttcatcctccttgagaagctctgcaatcacatcgactttctcctcttcctcacatatgaaattgaactctaaagcaatctcctcagcagctgcaaaatcgacctcagagttaactgttaccatctcgcccttcatgaaaagcttctttacgatggctgaaggctgaaccttcatcttatcagctaagtcccttattgtaatcttctccggaagagaaattgtcttaatctcgttctcatcctcttttggctgtgccttcggctgctgtggctttttcttaccgccgtgcttctcgagattgatgtaattctcctgcttctttccgagcttatcctgcttctggctctgattgtgattatgcttattctttctatcgttgcctctgtcgcggctctcctttcctcttacatcatcaggagctgcaactgcaactgtttcttttctgaaacgatttctgtcatcacctctgctgcctgttctatcgttatttctgtcattgctcctgcttctgtcattgcttctgcttctgtcattgcttctgcttctgtcattatttctgtcaccctctgcaggacgtctggagtcatttctgaagcctctgttattgtctctattattgtctctgctgttatctcggttattgttgtcgcgattgtttgttcttctatcgctgtttctgtccgtatttctgcttctgtcggcatttctgtcagtgtttctgttgttgattctgtcgccattgtcctgacgtctgtcgcttcttctatcagcgtcagcctgacgtgccggacgcgaattggttaccttcatatctgcatacggatccgctgtacgctcacttatagggcgcatagctctctctccgacaggtcttggcttaataatgctgtgctgctcaggacgtgatgactgattatcgcgtctgccattgccattcctgcgctgcgaactgttatttccattatttccgctgccgtttccaccatttgtcttcctaccctgcttactgtactgggcattgaaaacagctgtgatgcttgcctttttctttggtctgtcggctgccttagcctcatcctttttagtttcttccttcttaggtgcatctttttttacttctgtttttgcgtacttctttcgtacaatttgctgtgcctcctcctcaagaccgctctgcacatttttgacagcaaactgtgtgccgtttaatgtgtctatgacgtcctgcgactttatatttaattcttttgcaagttcatgaactctcatttttgccatatatctattttcctccattattcagttttattcggctgcagcttttttatcactgcatttgcaaggttttcatccgttactgcaagggaagcgcgaaactctttgcctattgcattccctaaccccaccttgtcactataaaaataaatcggaacctcatagaaagcagtcatatccgaaaaatgcttctttgtgttgtctgatgaatcatctgcaactatcactaaaaatgcctttcctgtctttacagctttctcggtagaaaactctccgctaaccacattgcctgactttgctgctaatcccagcatagaaagtactctatctgtcaatttggttcatctccttttcaagctcctcatatacctgttctgatacactaacaccaagggaacgctcaagtgcctttgtctttttagcctttttaaagcattcaaggctcttacatatataagctcccctgccgtttttcttgccggtgtcatcgagaattatgtcgccctccgcagtctttaccacgcgaataagtgacttcttttccttcatctcctgacagcctacgcatttgcgcattggaatctttttatttgccattactgctcatcaccactatctgccgcatcattttctgtacctgctgcttcgttctcgtcagcctctgtatctaaagcctctgtctgtacatctgcctgttctgtatcagctaatctctcgttctcagcaagctcatcatccgaataatcataatcgtcatcataatcatcctcttcatagtcattctcataatccatgaagtcccctgactctctggcctgtgtctcgctcttgatatcaatcttgaagcctgtaagtcttgctgcaagtcttgcattctgtccttccttaccgattgcaagtgaaagctgataatccggaacaacaacctttgctgatttctcatctgcatctgcgataacagagataacctttgcagggctaagtgcgttctggataagtattgccggattctcatcccatgtgatgatatcgattttctcaccacgaagctcatttacgatagcatttactctggcaccattcatacctacacatgctcctacagggtctacgtttggatcatttgaccatactgcaatctttgttctgcttccggcctcacgtgaaatagcctttatctcaactatgccctctttaacctctgtaacctctgactcgaaaagtctcttcacaagctcaggatgtgttcttgaaacaagaatctttggtccctttgatgtggacttaacctcaaggatatataccttgatacgctctgtaggcttgaatacctcaccctttatctgctcactctcagtcagaagtgcatctgccttacctaaattgatgctgacattctttccgatgtatctttgaacaacacctgtcacaacatccttttccttgctgttgtactcgtcaaatattacctttctctcctcctcgcggattttctgaaggataacattctttgcgttctgtgtagcgatacgtccgaattcctttgacttaacctcaactctcacgatatctccaagctgatagttaccgtttaccttgtgcgcatctgctaaggaaatctcctcaaccggatcctcaaccgtatctacaaccgtcttctcctggtagcatgagaaagcacatgtctcaggatctatttctacctttacattgtctgatttaccaaaatggttcttgcaggcagtcacaagagagttctcaattgcctcaagtaaagtttctttactgatgtttttctcctgctctaatatatttaacgcttctaataactcattgctcattattttttcctcctatttgtgttatcgtgcgctttaattaaaaatccaatgcctgacgtataagcgcaatgtcactcttattgaatgtagtctcattgccgtcttcatcggttattgtcactgtatctttatcataggctttaagcagaccataaaattcctttgatttgttgatagccctgtatgtgcgaatctctatctccttattcatattgcgcacatagtccttttccttcttgagaggtcttccaagccccggcgagctgacctcgaaggtgtacgaatcaggaatatagtcctctctgtcgagaatctcattcatctgccttgcaaccacttcacagtcatcaacagttatgccaccctccttatcgatatatgctctcaggtagttcatgccgccttccttaacatactcgacatcaacaagctcaaaattcatgctgtcaagaattggttgtataaaattctccgtctttgcctcatatacacttgcctttgacattttatcacctctcttttttatatttgtaactattcagaattgttccaagtggttctgaatagctgcctgatgtttataaacgtgaattgagagaggacttttgccctctctcaatctagtcaacgttgttatcataggtataatagcactatcagaaaaaaaaatcaagtttttttaaaaaagtacttgctttttttgaaactccatgatagtataatacacggttcgttggtcaagcggttaagacgccgccctctcacggcggaaacacgggttcgattcccgtacggactgctcactgatatttatttaattaaatacagcccaacccgaaagcatcgcatttatgcgatgtttttttattgttgttgacaccggacgctatgataaatatttctgccttaaagtaaaattgccttggagcgtattctgtttactacagaatgctccaaggcataaataatttaagtataagcctgaattaaaaattagtcataattaatcatcatatccgttaggattgttcttctgccatctccatgagtcggcacacatctccttaataccatactgcgcttcccagccgagctctctcttggcctttgatgggtcacagtagcatgtagcaatatcgccaggtcttctaggctttattgtataaggaatcttaacacctgttgcagcctcgaaattttttacgatatcaagcacgctgtagccatgtcctgttccaagattgtagatgcaaagacctgcattctcctcaattttctttaaagccttgacatgtccaaccgcaaggtcaactacatggatgtaatctctcacacctgttccgtcaggagtatcatagtcatctccgaatactccaagctctttgagcttgcctactgccacctgtgtgatgtaaggcatgaggttgtttggaataccgtttggattctcacccattgtaccactcttatgagctccgattggattgaagtaacgaagaagaataacattccactcattatctgccttgtagatatccataagtatctgttcaagcatagactttgtccagccatatgggtttgtacactgtccctttggacactcctctgtgataggaatctgtgcaggatctccgtatactgtagctgatgaagagaaaatgatgctcttgcagccattctgtctcatcacatcaacaagtgtaagtgttcctgcaatattattgttatagtactcccaaggctttgccacagactctcctactgctttgagtcctgcaaagtgaatacagctatctatcttttcttccttaaaaatcttatttaagatgtctctgtcaaggatatctcccttatagaactttacttctttgcctgtaagagccttaactctgtcaagtgacttctcagatgaattcgaaagattgtcaagtactacaacatcgtagcctgcatcaagaagctccacacatgtgtggcttccgatatatccggctccaccagtaactaaaattgccataataaatatctccttttcatttttgttaaatttattgtagcgcatttgctcatttttgtatagaataaaatgtagaagaaatatgtaaaaatgttgtaaaggtagtcaatatgaacaataaatacaaaaattcctatatcgtaaaagaaaaagagcttgtatctctgtccgtatataacgtaggcttccagagctgtgatagcctgtatcagtggggacccggtatcagagaccattatctgattcactatatcataagcggtaaaggccgctacactgtaaatggcagtgttcacacattaactcccggcgatgcgtttctcgtatatccaaataccgaagtgatttatcaggctgatgcagaagatccttgggaatatacctgggtaggctttacaggcagcgatgctgcaaccattttaagagccactgatttcacaaaagcgcatccatacatacacagtgtatcaaacggaaacgaaatcaaaagacagctcatgcatatatacgacgccagaggcacagaatttgaaaatgcactcgaaatgaccgggcgactctacaccaccctcgctctttttgtcagtgccgccacatcaaagccacctcaaaacagtgcaaactcctatgtacaaaagggcatcgaatacatctccgccaactattcataccctatcaccgttgaggatattgcatcatatataggcttaagccgaagccacctgttccgttccttccagagtatcctcggtgtatcgccaaaggaatatctgaccgatttcagaatcaaacaggcatgctatctgcttaaacactcctcattgtccatcacagcaattgcaggctctatagggtttgataacagcctttatttttcaaagacctttcataaaataaaaggcctttcgcctaaggagtatcgcagtaaatacaaaaaagctcaagaatgaaaaaagctgccgggcttcacatgaagcccggcagcttttttcatatatctctttatgctaaactaagcaagcttagatttagcaacctctactaatttagcaaatcctgctgcatctgtaacagccatatcagctaataccttacggttaaggtcaacgtttgctaactttaagccgtgcatgaactggctgtatgaaagtccgttgagacgagctgctgcgttgatacgggcaatccataactgacggaactgtctctttctctctttacgtccagcgtatgagcttgtaagtgctctcataactgactgctttgctactctatactgcttagatctagcgcctctgtaaccctttgctaactttaatgttctgttatgtcttttcttagcgcctaaaccgcctttaactcttgccatttgttgattcctccttaactaatactaccgattacatgtatggtaaaatcttcttcatattcttaacatttgtctcatctgtcattgttgcttttctgagatttctctttgtctttgttgttttcttagttaagatatgtctcttgtaggctttatttctttttaactttcctgttcctgtaactttgaaacgttttgcagctgctctgcttgttttcatttttggcattgtgtgttcctccttaaattgttatctcttttctgccagcaccataccgatgcttcttccttcaaccttcggtgctttctccactaccgctacatctgaaagattctccgctatatcatcaaggatatgtttgcttgcattcatatgagccatctcacgtcctctgaatctgagtgtgatctttaccttatttccttttgcaagaaatttctttgcagcattcatcttggtattcaagtcgttagcctcaatgttaggtgagagacgaatctctttcaattcaacggtcttctgctttttctttgcatccttttccttacgggcctgctcataacgatacttaccataatcaatcaccttacatacaggtggctttgcatttggtgctatctttactaaatcaagtcctgcctcgtctgcaatcttttgagcttctcttgaagaaacaattcctaactgctctccatccgctccaatcagtcgaacttctctgtctctgatctgttcattaatcattaattcgctaatggtcttgtacctccataaaaaatagtggataggcagactatccactatacaatcttcaacacaaatgtttgaaaatattaacgctaagtcgctccattgcgcttaggtgagagtggatactctactttgttttcatacaactactagaatatagcacagacaatttctgttgtcaacacttttatctaaatttctatcatctaatatgtaccaagaatcttaagggcaattgcctcttcccttatgcctcttaacgcattctgcaccgctgtatccgtgaaacgcccttcaaaatctacaaagaacctgtactcccatgccttatcagatatcggacgagactggatatttaacatattgattccattgtatataaagtgtgccagcatatgatacagtgcaccactcttgtgaggtgtctcaaagcatatgcttatcctgtccgcatctctgcggcatacccttttagccgacacaattataaaccttgttgcattgtttttattgttctgtatgcggctctcaagcacctgaagcccatatatatcagccgagatatggctagctatgccagcctgtgtgatatctccgtcatcctttaccttctttgcagaaaaagctgtattcctgacagccacctggttaatatccttatgctcatcaaaaaaatctgagcactgcataagcgcctgcggatgtgaatacacagtccttatatcagaaatctttgcacccggaagtcccatcagactgtggtcgatgcgtataatctgctccccaactatataattgtcgtattcaacaagcagatcatagttttccgatacaataccggctgaagaattctctatcggaagcactgcataatcagcctttccgcatttgatatcctccatggcatccttccaggaatccacgttgtagccattacaattctcgccaaagtatgtcttcatggcaagctgtgagtatgcaccctcaactccctgaaacacaatccttgcattggaaaaatccaggctgtctacctcagtaaagttttccttctccactatgccatgctcagtcataagctgatactgcttctttctactggtcgacataatctgttcaaaaagctcaactataccgtgcttcaaaaactcatcatctgcaagagacgataatttctcaagcttttcatcctctctagtcttgtcaaagacctttttgccggtggttatcttatactcggcaacgtgctttgagatatccattctttccttatataatctgactatttcactgtctatctcatcgatagactctctcaatttcattaaatcttccattattgtctcctaaaaaagatataataaaatattattacaaaatttatagaaaggcaagtaatccttgaaagatttatcatatatagatatcatttagttaatatctaagcataaatctcatatactctcgggagaattacatgaaaaaagaacacgcatgatcaatcaactcatgcgtgttttttattaattcatataaaattcaaatcttgatctgtatatatcactgcactttccggtattctggtctatcgcaataacagaaagcacattatttccctcaggaacaggtattggagctgtatactctgttgatgcagcactcggatctgacgaatcccaggtatagtataccttgcaattttcaggtactgtgattgtaatgtctgtctgtgcaccaaatgtacctccgtcagggtctatctccggtgcatccggcgcctcaaactcgatttcatacttggcagatgccacctcgcttttaattcctctgtcatcaactgcaacagctgttatctcatatgtaccttccttgtccagggtgatcgggctataatatctttctcctctggtcaaaggatcatccgaatcatatgaatagtatattttggtatcgctgtctgcatctatagaaagctcaatagtctctccatacttaccactgctcttgctaaactgcggtttagatacagtataatccgcaaaaagctttaaaacagatgcatccttagcactctcacgcagcgcaacaattgcatcataatccttttttgattcataaatcgagataagcttcttataagcctctttgctctttgaatcaatattgataatttcctgatacagcacaagagcggcatcataatccttcttcgacatatatatatcagccaaagcaaatctgacatctgtattatccgaatcaatcgacaaagccttctcataataagaaaccgcggaatttatattccccgccgaataagctgcctttgcctgcttcacctgataatcaaatgaattgtcatgtgatctgcttacattacgtgtaatagctgcaataagtattacaattgctacaacgcacactacagctgagataataattatcttcttctgctgcgctctctttgccctctgtccgtcagactgcggcttctcatcacacggttgtttcgtctgagactgctgcttgcctgtctgagcctgtttattttcatactgcgacattctgtccggtttttgtccgttccgctgaccggcactatgaagctgttccctcaccggctcatcaaacctgattgtcctatcagacacaggctttacagtcttttgtccatcagttcgcctgtcatcatttccaaccagattatcaagataatcatcaaattcgttgtaatcaggcactatctgaaccggatgcccacagacatcacagtacagactgcccgccttcaattcattaccacaattggcacatctcatacatctaatcctcttacttattgtctaattatctcttcatagcctcaacacaattgctcatgagcatcgcaattgtcataggacctacaccgcccggtacaggtgtgatatgtgacgctttagacacaacagaatcaaaatccacatcaccacaaagcttattttcagcatttctgtggattccaacatcaataacaaccgcaccatccttcacatatgaagcatctataaacttaggctttcctattgccactataagtatatcagcatttttacatacatcttttaaatcctttgtatgtgaatgacataccgtaacagttgcattctccctaagcatgagaagtgacataggcttgccgactatattgcttctgccaaccacaacacagcttttaccatcaatatctatattgcttctctttaaaagctgaatgataccggccggagtacacggcaaaaaaccaggcttccctataaccatcgctccaacactctgtggactgaagccatcgacatccttcttcgggtcaatagcatcaataaccttgtcctcatcgatatgctttggcagtggaagctgacagagaataccatttacagaagcatcagcattgagcttttcgataagttttaatatctcatcctccgtagtctcctctgcaagttcatacgaaagcgatttaattccgacatactcacacgcccttttcttgttgcgaacatacactgatgatgccgggtcatttccgacctgaatcaccgcaaggcagccctcgatgccttttttcttaagctctgccacttcttccttaagctcctccttaatctgtgttgaaatcaattttccgtctattagattggtcatattccctcctagaataatcctgtgatcacaccattgtcatccacatcaatgccgtatgcagccggcttctttgaaagtcccggcatagtcatgatagaaccgtttactgccacaacaaagcctgcacctgctgacgcataaacctcacgtacgttgattttaaaaccgcttggtctgccaagcttctttgcatcatcagaaagcgaatactgtgtctttgccatacataccggaaaatctcccattccaaggtctgtaatcctcttaagttctctctctgctgccggagaatatgtaacaccatctgctccatatatttcttttgcaacagtttcaatcttttccttaagtgacaggctatcatcatagagcactttgaaattgctttccttgtgctcgattgtttcaagtaccttgttggcaagatcaattccgccttcgccacccttctcccatacctctgagagtgcaaattcacagcctctttccttacagaactgctctacaaaatcagtctcagcctttgtatctgtgacaaatgaatttaatgtgacaactacaggcactccaaacttgtgaagattctcaatatgcttctcaagatttacgattccagccttaagtgcatcaagattctctgatgaaagctcatccttctgcacgccgccattatattttaatgctctgattgttgcaacaagtacaactgcatccggcttaagccctgccatacggcacttgatatcaaagaacttctctgcgccaaggtctgcgccaaagcctgcctcagtgataacatagtctgcaagctttaatgctgtctttgtggcacggacactgttacagccatgtgctatattggcaaaaggtccaccgtgaactattgccggtgtatgctcaagtgtctggataaggttcggctttaaggcatcctttaagagagctgccatagaacctgtagcctgaagatcatcggctgtgacaggctttccgtcaaaggtatatgccacaataattcttccaagtcgcttctttaaatctgccatatcatcggccagacagagtattgccataatttcagatgctacagtgatgacaaaatgatcttctctgaccattccgtccatcttgcttccaagaccaacaacgatatttctaaggacacggtcattcatatccatacatctcttccatacaatctggcgcgggtcgatgccaagctcgtttccctgctggatatgattgtcaagaagtgcggcaagcagattgttcgcagatgtaattgcatgaaaatctcctgtaaaatgaagatttaaatcctccattgggacaacctgtgcatatccgccaccggctgctcctcccttgataccaaagcaaggtcctagtgacggctcacgaagtgcgataagtgctttcttcccaaggcgtccaaatgcctctccaagaccgacgcttgtggttgtctttccctcccctgcaggagtcgggttaatagctgtaacgagtatgagctttccgtcaggatttttctttgtgcgattgatgagctcatcagaaatctttgccttatactttccataaagctctaagtcatcctcttcaatccctatagatgctgctacatccttgattggaagcattgtagcttcctgtgcgatctgaatatctgttttcatttttctttgctcctttgtgttaattattctctaatatagtatctaattcctctttagtcaccagaaccttgcggggctttgtcccctcctcaggtcccactacaccggcctcttcgagctgatccattatgcgggccgccctgttgaagccaattttaaggtatctttgaagcattccgattgaagcccgttccttatctgtgataattgacgctgcctccgcaaagtaagagtccctgccatcatccgtgttttccacatctgaaatggtaacggttgtatttgtcgtatcattcgacaggctctccatcttttgtgccacatcattactgtactgtgcattctcattattttcaataataaatttcacaatatcggaaacttctttatctgaaacgaatgcgccctgtactcgaaggggcttcggaacaccctgtgggtcaaataacatatctccctttccaaggagcttttccgcaccattcatatcaagtatggtacgactgtcaacaccgcttgtaaccgcaaatgcgatacggcttggcatattcgccttgatgagacctgtaataacattaacagaaggcctctgtgtggctatgatcagatgtataccggctgctctcgcaagctgtgccagcctgcatattgcctcctctacatcctttgatgcaaccatcataagatctgcaagctcgtcaactataatgacaatctgtggcatctttggcggtttttctgtatccttgccatccattgcatcaatcatggcattgtaaccgtttatttccctgacaccactgtttgcaaacttctcgtatctgtctgtcatctctgaaaccgcccagtttaatgctcctgcagcttttttaggatctgtaacaaccggaatcatcagatgaggtatgccattgtatacactaagctcaaccaccttcggatcaatcataatcagctttacctcatccggctttgccttgtatagtatactcatgataattgtattgatacaaactgacttacctgagccggtagcacctgcaattaaaagatgtggcatttttgcgatatccgtaaccttaaccttgcctgcaatatcttttcccactgcaaaggtaatctttgatttggcatttttaaattcttcagactccacaagctccctgaaggaaacagcaacactctggctgtttggcacttcgatgcccacagcggcttttcccggaataggagcctcgattcgtatatccgcggctgccagattaagctttatatcatctgccagattcacaatctttgataccttcactccaagctccggtgtgatttcaaaccttgtaacagcaggaccgcagcttatattattcaccttcgcattcaccccaaacacattaagagtctgttcaagctttgccgccgtttcacgcagatgagcctgcgaatcaccggttttccccctgtcaggagccttaagcagatcaacagccggaaatacatacggcttctgctggattgcattttctgcatcatttatcgctatctgctcactgactttttcaacctctttggcaagctcatccttgtctgatttgacctttttcttacctggctctgctgcaggtggttttgtcattaccgcatctgcagccggagctgataattttgattgcagctcattatctttttgtatgtcaaaatcatcagatatatcaggctccacgcagcccgatataggtatctgcgacacatggcttgcagctgtgccacccaaaaccgaaacaggctccgatgccacaccaaagtccggtgtctgcactatttcccctgcatcccctgatgtaaggcttgtcgtctttttctcctttattgcaggtgaactcggataattctctatagttatctcaccaagcgcatctgtagctgctgcaccttgtccaaatatccccacatgcgctgtatcactacctgtcatgcctgaatctagcgcgttttcactgccatcaatttttgtatcaagtgacacgcctgttatcttattgtccatccttcgaccggcacgcttactccttctgccaccttttgcggtctcctttatgtcgctgtctgtattatctgaagctaaaccctctcttgtctgacgctctcttgacttatactgccgatactcctgatatctctcattattctcacgcgctgactcgtatacctttcggccgccgtttctcatacccttcatgaatgatttaccggtaatgagcacaagacagataatcatcacaactattgtcaccacgtatgcacctataattcctaccgccggaactaaaatgcagcctataagagcacctacaaagccaccacctgaatgcctttcaacactgtcaatgtatgactgcaccggcgaaaccgcgaattcaccatacactgccaggtacataaacacacatataaaccatatgaaaactatggtcataacaagcttcatgatagcatatgaattgcccttattggacacagcaaaaaagctgcccaccagaagcacaagcggaaaaatatatgccaccattccaaatataccaaaaaggaaaccgcttactgcgtttcccaaatgaccgcctattccaaaattgcttataaataaaaggattgaaacagctactactatccagagaaatatttcctttttaaaggcctgctgcctctctatctgagccattctctccttttttgtctgtctttttgctgaggatttcttcctcgttgccatctaactaacctccgtattttgatttacagagtatataataacatatttcttctgtcctgtgtaaattttctaaagtaatttttcgattttgtgattaaagggtcaaaaggtatcatcgattcatgcttgcatgcaattcgatgtataccttattgacccgcactacaccgagaaagtagcaatttgctgcggtgacgtagcaaattagcggatttcgaggcggagtcagattacgggaatgcgtagcatgtagtaatctgattaatcataaatgaggtgcaaaataccccgccatgaatggcggggtaaaatgttatgcaaaaaccataatttcaccaaaatattttattcaccaataaggtaattgtataatccctcatatttgaacttggaagcattccaagagaaatcattggccatgcccctgtccacaatctggttccactcccgcttcttatcgaagaagatgtgcttagaataattgatgactgcaagcatctcatcggcattgtagtttgagaacgagaaaccatctcctgaattttcatactcattgtaaggcttaaccgtatccttgaggcctcctgtctcacgaacaatcggaacggtaccgtagcggaatgaaataagctgtgtcagaccgcaaggctcaaacctggacggcatcagaaatgcatcagcagccgcatatagtttgtgtgccagatcatcagagtaacatatatttgccgaaactctgtcagggtatttccatgcatagtgtctgaacatattctcgtactgaggatctcctgtaccgataacaacaagctgtgtgaaatcgtccacgataccttcaatcacatgattgataaggtctagacctttctggtctgtaagtcttgaaataagacctatcatgtacttctttttatcaaccgcaagcccaagctcctgctgaagctttgtcttgttgttaaacttcttctttctgaaatcggaagcattgtaattgcaatagattttgccatcagtctgtgggtcatagacattgtaatcaataccgtttacgataccctgcatgtcaaaatgtctggcacttaagagtccgttcaatccctcaccatagtactctgtctgaatctcgtttgcatatgtatcactgacagtggtgatgtagtcagcatatacaagaccacccttaagcatatttgcatccttcttgaactcaagcttatcaggtgtgaacagattgtctgtaagacctgaaacaccctgtacccactccttgtcccagataccctggaacttaagattgtggatagtgatgatagtcttgatcccccagaagaatggatttgcggcaaactcattctttaagtatacaggcagaaagcctgtctgccagtcatgacagtgtataatatccggcttaaaatcaataagtgggagcattgagagtacagccttgtcaaagaatgtatacttctcaatctcaaacttagtgtcagaagtatatggagaaaatcctgtaaaaaactcctgattgtcaataaagtaatatgtaacgccgtcctgctcatatttgagtactccgacatacttgtcctgcacgtatggacctgagctcatgtaaaaatgggtaacatactcaaaattattacgatactgctccggtatacagctataatcaggtattacaacccttacatcccaatagttcttgtcaaactctttaggaagtgcaccgcacacatctgcaagacctcctgtttttataaatggtacacactctgaagctacaaatagaatcttcttcatattctcctcccgctaaaacccgtgatatataatatttagtttactcttcccaattgtggtatacttcctggacgtcgtcatcatcgtcaagaaggtctaagatacggccgatattcgtgatatcagcttcatctgtcagtgtgacatatgtctgtggaatcattgtaacctctgctgaagccattgtaatgcctgcctcctcaagagcagccctgactgcatcaaaatcagcaggtgcagttgtaatttcgtagctgtcctcctcatcggcgaaatcctcagcgcctgcatcgagtgcctgcatcataaggtcatctgcatccatatcgcactcttccttgtcgatgatgatctgacccttctcgtcaaacatgtatgatacacatccctgtgtaccgatgcttccctggccctttgtaaaggcattgcggacattggccgctgtacgattcttattgtctgtaagacactttacgataatagctgtgcctgatggtccatagccctcatatgtagctgtctcatagtttacactgttgccgtctcctgccgccttcttgatacctctttcgattgtatcgtttggcatattgttggcctttgccttggcaactacctgtgcgagcttgaagttattggcaggatccggtcctccctctttaactgcaactgcgagctctctaccgatcattgtaaagattttgccctttgcagcatcatttttttctttcttatgcttgatattcgcaaatttagaatgtcctgacataatttgtatcctcttttctacttttaaaaataatctatatcttataatatcattttttctcttccggtgcaagtttcttaatcattacctgcttaatcaccttatcctcgacgctcataacagaaaatctgtaaccatatgcgctaatcacagtcttatccccctcctccggaatcttatccgaaagcgatatgataaaaccgttaagcgtctcgtaggcatcatcatcaacaggcagtgacagtgcctccttcacatcggaaaactcagtcatgccgtccattataaatgtctcgtcatcattctttctgatatagttttcttcctcatcgtgctcatcctcgatatttccgacaagctcctcgagtatatcctccatcgcgataagtcccgatatctgtccgtactcatccacaaccatcgcaagatgactctttttagactgcatctttttaaacagatcattgatgtttaccgtctcgggtatgaagtccaccggccggataagcccatctatgtccttgatactgctgcggtaaacctcatttttttcaaaaaatgtaaaagcatccttgatatgtaagactccgatgatactgtcaacatcattctcatagaccggaaagcgggatttgccggtatctatgataaattcgattgcatcaataaaggacatactgccgtcgaggcttacgatatttttgcggtgagtcatgatatcttttacttccttatcatcaaactcaaacacattgtgtatcagctctgcctcagatgcaaggattgttccctgctcatgtccctccctgaccatggaaataatctcttcctctgtgacatcatcatttccaagtattccatcgagagtctttttgttgtttttcattccataaagcaatactccaatacacaaaagaagtatcactacaagtatcgataaaattataattgcatataacataatgttttattatcctatgtaataagttctaagctgatttcaagcgccctgtctattttaagcaatgtgtcctcatcaagatggcacaccttatccttaagcctttttttgtcgattgtgcgaagctgttctaaaagcacaaccgaatcctttgcaagcgcatactccttgcaggcaagctccacatgggtgggcagctttgctttatgcatctgcgaggttattgctgcgcagattaccgtcgggctgtgtctgtttccgacatcattttgtattataaggacaggtcttatcccgccctgctctgagcctacaacaggccttaaatcagcgtaataaatatctcctctttgaataatcatacacgaatacactccatattatggtatacaaaaagtatctccagatttttcgagtgtattcttaaaagttacacttttttagtttttgtggtaaattcttggaacacgcggtgtgataagacatgcaaactcatagttgaatctgcctgacagctcacctaactgctccatagtgattgtctcatccccttctttaccgagcagagtaactgcatcgcctattttcacgtcaggtatgtctgtcacatctaccataaactgatccatgcagactctgccgcatataggtgcttttttcccttttatgagaacccagcccttgtttgaaagtcctcttgaatatccatcaccatatcccaccgggacagttgctatcatcataggatgctctaccgtaaatgtgccgccgtagcttatatgcctgcccggctcaagctcctttacataagcaaccctgctgtgcagcgacataacaggctttagggagattttactcttgtctacctcctctgacggccacagaccatagagtgtgatgcctgctcttaccatatccatattgcactccggaatttctactattcccgcactgtttgagcagtgcttaattgggatctcgactcctcttgcctcaacaagagctatcatcctcttaaaaagatcaaactgctcaaaggcaggctcctttgacagctcatctgcccttgcaaagtgagtgaatattccctctatcataatattcggcagcttagcaatctgtgcaataatatctgcactttcctctgtcacctgaaagcctatacggcacataccggtatctatcttgatatgtatcttacaggtcttattcttagcagctgcgatttttgaaagttccttagctgtctcgtaggtacataccgccggtcgcacatcattgtccactatctcctcaaactgctccgggaagctgagtcctaaaataagtatcggcttttttctgcctgctgcgataagctgcattgcctcgttgcttgtagcaacggcatagccccacagatacggaagcggctccagtacctctgaaacagcctcagcaccatgaccatagccatcagcctttacaactgctgccatcattgtccccggctttagcttattgtgcatcgactccatattatataaaattgcatccagatctatatctgctctgattctgttaattgccatttttttccaccttaatccaaactttatctaatccatcaataatatcacttgctatcataccataagagccggtattgtcaaataccatatccccggcaagtccatgaataaatgtaccgtatgccgcggcctttttcgtgtcacgccactgtaccagaagacctcccacgataccgcttagcacatctccgcttccggctgttgccataccgcagttgccggacagattgataaacctttcgccatcagccgctgcgataatcgtacgaaaatccttaagcacacaagtcacattgtacaagcttgcaaactctcctgccacaccgatgatatcctcctgtatattagcaatgctctttttcataagtctggacatctcgcccaggtgcggagtcacaattactggcattttatgctcaataagtaaagtcatgttgtctgatatgatattaagcgcatccgcatcaatcacaagaggtatctctgctgtttttagtactgtttcaactaacattttggcattatcagactttgaaagacctggacctatcaccactgcatctgcccaatcaagctctgtctcaagtgctttagctgacgcgatatcagtacaaagcagtgcttccggcaaagcacattgtattattgagcggttgcactccggcgttataattttcacaagccctgctccgcttttgtatgcagcctttgccgaaagcaccgccgcaccggccatattgcggcttcctgctataactaacagttttccgaaagttcccttgttggagtgtgccggtctgttatcaagcttctttaaatcagactcatcaagagcccttactgatggcagattaccacaaaagctgtggtcatctatgcctataggcaccaccttaaccagaccgcaataatcacagccaggccacaggagaaggcctgtcttcttataagaaaaagtatatgtgaaatctgctttaaaagtgcatcccatcacatgtcctttatcagaatccactcccgacggcacgtcgaccgccaccctgtaagcatttgccttgttaacggctgaaatcacatctgctaaagagccttctatggctcgcttaagccctgtgccaaacagtgcatctattattacgtcacttttacacacacactcaatatcagagaccaccttaaagccataccttgcgtatatatttttctgcagctcaaagagctcgcttcctgcctcatctgtgccaaaagcatagtacaccatgcatctgtatccggcctgatttaaaagtcttgctatcgcgataccgtctcctgcattattgcccctgccgcatatcacggcaaactcctttgatttatcaaaacatgcaacaagctcccggacaacaccggccgcagcctgctccatcagcaccaccgaaggaaccaaaaagacctgtgatgttgtatcgtccagaagcttcatttcattacctgtaacaatatattccaatatcaattccccttattctcattgtttgcattatcagcatttgcattattggcattgaaaaccataggatcgtcatattcaatatcaaaaagatctaaaaccagtaaaggaaccttttttatcattcataagactcaccctctatttatttttggagtttttaacaatattatagctgagctgcataaggctgtcagacagatgaacactctccacaaccacatctttatttggaatttcaagatccacatgtgcaaaattccatatagcccttattcctaaatccacaagctttgacgcaatagagtcagcctttgactttggcatggtgagcgccgcaatatccaccctgtgtgttctgcaatactcatccagttcacttagcataaggattggaatacctcgcacactctttcctgaaagctcaggatttatgtcaaaaagcgctgttatgacaaagccaagcttttcaaactttacataattggcgagtgcctggccaagatttcctgcaccgatgataattattctatgctctgtgttaagccccattatctttccgatttcctcgtagagaaactgaacattgtatccgtatccctgctgtccaaagccaccgaaattattgagatcctgtctgatttgtgaagctgtcactttcattctgtgactcagatcgtttgatgaaatacgctccactccctcatccaaaagctctccgagatatctatagtatcgtggcagccgtctgataaccgcctgtgatatttctttactcaagtcttattcctccaatcatcaggatatcatttctcttttaaagacaaaaacccaagattaattataattttttgaaggtcatctgtcaatgtgttaagaatttaacattcaaaaaatttataattatccccgggttatatcttattctaaggctaaaaagccaaatttcagattaaattgtcttctcaagctcctctctgattgccttgatgaagccttcgctgtttaaaacagtaggattttcaattgttgtgatgagtgcaagatcctttgtcatctttccgctctcaatagtctttatgcaagctgcctcaagcttgtctgcaaactcagaaagtgccggaagcttgtcaagctctcctctttttctaagtgcacctgtccatgcaaaaatagtagctacagagtttgttgaggtctcctcaccctttaagtgcttgtaatagtgtctctgaactgttccatgtgctgcctcatactcatagtatccgtgaggggatacaagcactgatgtcatcatggcaagtgaaccgaatgcagatgagatcatatcactcattacatctccgtcgtagttcttgcatgcccagataaatccaccctcagatttcattactctggcaactgcatcgtcaataagtgtgtagaaatatgtaattccagccttctcaaaagcatccttatactgtgcatcaaagatttcctggaagatatccttgaaggtgtggtcatatttctttgagatggtatcctttgtagcaaaccataaatcctgctttgtatcaagtgcatacttaaagcagctatgtgcaaagctctcaattgaatcatccaggttatgctgtccctgaataactcctgcgcccttaaactcatgtattaattctctagtctcagttccgtcttctgctgtaaatacaagctcagcctttccgggaccggctaccttcatctctgttgccttgtacacatcaccatatgcatgacgagcgattgtgattggtttaacccatgtctttacgtttggctctatgccctttacaacgattggtgctctgaacacagttccgtcaagcatagctcttattgtgccgttaggactcttccacatctcctttaaattgtactctgtcattctggctgcgtttggtgtgattgtcgcacattttactgcgacaccgtatttcatggttgcctttgctgattcaacggtcacctgatcatctgtacgatttcgctcctctaatcccagatcataatactctgtctttaaatcgataaaaggtattaaaagctcatcctttatcatctgccagaggattcttgtcatctcgtctccgtccatctctacaaggggtgttgtcatcgtaatcttgctcattcttaaatctcctttacttaataaggttttcccaaccaaggtgttccatattttcctttgaattgtttatatgctctctggcgcatttttctgccagcagtgcgtcatgattcttaattgcctcgcatatctgtttatgctcgtgagtggagtttttggctctttttgtctcgccgagtgtcacctttctcactctgccaacatactcatgatagtcctttaataccctcataagctccttgcttccgccggcctcatacagcagctcatgaaacctattgtccagctcaagaagcttctttgcattgccctttttctcgtgaaactccgtgagataaatattctcctccatggccgccatgagctcatccgatattctcgttgcagcccatctggcacaaagtccctcaagcagagctcttatctcgtatatatccctgatatcgtccgtggaaacaccctcaacgaacgctcctttattggggataatagacacaagaccctcaagctcaagctgacgcagcgcttccctcacaggagtcctgctcacccctagctcatcaccgatattcttttccttaagctcatcgccctttgcaaatgttcctgcaagtataccatccctgatatgattgtatactctggcactcaggctgtaattatcatgtgacatgtactaatccacctcactataatactatattaagctttttacagcaatcagtaatttgaactacaagctcattatctgtgatggtagtcacacggccctcatcgtactgctcatctacccattgctttatcatgttcacaagctttgagttcttatctacttttctgtcatccggcaggcggtagtaagtgtttatccacagcgctattcctgcaagtcccgatgtattggacacagctacaagaggtggtctgtttaagaatttacctgtatcgaatatgttgtaaatttcctcatttttgagaagtccgtcagcatggattccggctctcgtcacattgaaattctttccgacaaaaggtgtacggctcggctgcacatatccaagctccttctcaaagtactctgacaactcagtgataacagtcgtatccataccatcaagtgtgcccttaagctgtgcatactcaaataccatagcctcaagtggtgtgtttccggttctctctccgataccaaacagtgaacagttgacaccacttgctccgtagagccatgccgtagtcgaattgtttactgccttgtaaaagtcattgtgtccatgccactcaatctgtgatgaaggcacacctgcatgtgtgttaagtccgtatatgatacccggaacgcttcgaggtataactgctcccgggaagtttactccatatcccattgtatcacaggcacgcaccttaatcggaatcttgtactcctcctgcagcttcataagctcaacacagaatggaataacaaaaccatatatatcagaacgtgtgatatcctccagatggcacctagggcttattcctgtctcaagacactccctgatgactgacagatacatattcattacctcgcgtctggtcatcttcatcttgtagaaaatatgataatccgaacaacttacaagtataccggtttccttgagtcctatatcctttacaagctcaaagtcctttttgctggcacgaatccacgatgtaacctccgggaacttatatcctctctcgagacacttgtaaacagcgtccctgtcctttttgctgtagaggaaaaactcgctctgtctgattattcccttagggccaccaagcttatgtaaataatcataaatggtaacaatctgctccgtcgtgtacggtgccctcgactgctggccatctctgaatgtagtatctgtaatccagatgtcctccggcatattgtgaggcactattctgtcattgaatgctatcttaggaacttctgaataaggaaagagatttctaaaggtattcggctcatctacatccacgagctgataaaaatgctcttcaagctgcagtaaatttgttttttcgttcatcaaaacttctctcatcttcacatctcctgtgcttagttttatcttttgaataattgtatacaattatactttttgtgtcaataaaaaaattaaaatcttagtgtaacactttgttatatctatcataacctagagtgtaaataaattttattggaggtcacttatgagtgatttagcagcaacaaactgttcatgcagcaatacagataacggatgcggatgttcttcgattttatggatcatcctgttactgtgctgctgttgcggaaatggtaacggaggctctttcttcggaggaaacgactgtggaagcggcaataacagctgtatctgggctatcatcttacttttctgctgtggtggctttggctgtggaagcagcaataacggctgcggatgtggctgcggctgctgatttacatttttactgcgggtcttttcggcccgcagctttttacgatttttcggtattctttttttgcctgcgctgctctttctctttgagcttttcaaggactttacattcgcccttcaccctgtgctttttgatgcattcttcatctatctcgtatacgtcgtgaccatctatgataagcatataatctttttttaataatatatgctgtaaacatgcataatgtgaatcaggtgacatattatatagaaatatattttaaaggatttttatggacgagaacagcctgtttacaccattcgatgaaataacccagacaagggagcttcagatgcttaaaaccataattccatatatgccgcatgactcacaaaagcaaatgactcttatggttcactacatatcacttatgaattcaatgagaatgatagattgtgcacctgcactgtctgttgcggagactgaaagtatgtcagacagaagactttccatgctcaatgccttaaagaaatactgcagcaaaagtgaacaggatacgatagacaatctattaaatattttttcagttttggacaatagggagatttatgacaaagcaggaatttttaaataattttgcacaaaaggaaaaaccaaaggacacaacaagtgccatgccgtttctcatggaaagtattaaggaggcaaagcgtaacggcatagaatttaccaaagaagaggtctattccatgtgcactgagctaagcaaaaacctgcctgagaaaaaccgcaggcaggttgaaaggcttttaaaaatgctatagttaatttttaaacgaatctgtatttatgcgaagtatcttgtctatcggtgcaggcgagtttcccttgccatccgtgccctcaaggtacttctcccccgcagattcaaaaatgacatacaatcttttatccacactgtcaagctcctctgagcccggcggcatctctattgtgatgtcaggtctgttaggccttgacgacagagctatgagtgatttgtagcacttgatatacgatgactcattcctgccataggaggtgctcagatatacctttcctgaggcatcaaatgtaacgccctgcactctggcaggtatcgtatatgtgctcaggcttgtgagcctgtcgtcctttttgtcataataatatgctaccatctttgacctaaaaaggatattgtgagtggctatccacagcctgcctccatagtatgttatgcacgacggcttgtttcccacatcaaacacatctaccacacctgtcgcatcgatgacctgcttggaattcgcagtggccattagagagagaaaatcatacgagatgcgctccacagttgtgtcgtaggaattgcacacccatacattttccccgtcaaaggcaattcctcccaggtgactgtttgcatccatgccaagtgtcacaaggtactctccgtcctccctgtcaaataccataagctccccaagtgagcccttgtcatcagaatagctcgtgataagcacgtattcgtccgttatacaaattccctgaggacactgtgcctcactgaaaatataattattgagaaaatcattttccttcgtctccggcatgcccggaatatctatttcatctataaaatcgtaatcgcaatcattaagcgccagtgtatgcgcttttttattactcctgtaattgtaatgctctacgctgtattcattgttaatcgtcctgacccatttggcatataccacatatccatttgctttttcgtaggtcagaacatccgccttttttgaaaaatgctcatccagataccagccatcaaatttataaccgtatttgtgtggttctctaagtcccatgaatttctgttttggtgtgatgtatccataattattgatattgtttgccgcaccgcccagattatagtaaatatatgaaacgccatcactttctgacatattgtcaaccagtgtatttagtgatggcccggaagcaaaagaggcagcttctgcctcttttatctccgatgcaaacacatgagtattggtaaaaatcaatgtaagtaatataattaatgctattctactcttcaacttcaacaagcttgcttgccctttcttctatctgttttgcagccacatcatccggtgcctgctcatatctggcaaactcatatgagaatgtgccgcttccgctcgtcattgagcgaagtgtggcattgtatccataaagctccagataaggaatatccgctactatctcctgatatccattgtctgtcgggttcatgcccatcactcttgcacgtctcttgttaagctcacccatcacatcacctgtatagccctcaggcaccactaccttaagagttgcaatcggctcaagaagcactggctttgcctccataatgccctttttaaaggcctgttgtgttgccaccttaaaggccatctcagatgaatcaaccggatgataagagccatcatacagcacagcctttatacccgtcacaggataggctgcaagaggtccctttttcacggactctgcaatacccttttcaacagccgggaagaagttcttcggtacagctcctcctacgaccgtctgctcaaatacatatggcgtatccatatcacctgacggctcaaaggtcatcttgacatgtccgtactgtccgtgtccgcccgactgcttcttgtacttatactctacgtcagattttttccttatagtctccttaaaggctacctttggacgcataagctctatctccaccttgtacttttcaagaagctcacttgccactacatcaagctgcatatctccgataccatatagtacagtctgtccattttcactgtcatttacactgtttagcgtcagatcctccattaacagtttctgtaaagactgtgaaatcttgtcctcatcgccctttttctttgccttgtagcgcattgccacatacggctttgatatacttgttctaagatatgtaacaggcatatttctggtggaaagcgaatctgtcgtaagagtctttgtaagctttgcaagcgctccgatatcacctgcatgaagctccttcacttcctccaccttactgcctctcatcacatagagcttaccgattttctcatcgcagtccctgtggtaattgtaaagcacatcgtctgtcttaagtacacctgaattaaccttgatcagcgaatacttaccgatgtacgggtcaactatcgacttaaacacataagcactctttgattttgcaaaatcataatcagcattatacacctcatttgtcttggtgttaataccggtacagcttctcttctcaggacttggcaggtatttcacgatatcagccataagtgtatacatgccccttgcgagaatatttgagcccatgagcaccggtacaatagagccctcaagcacgtttgcacgaagcgcagccctgatttcatcatcagaaaactcctctccgccgaaatatctgtccatgaactcctcacttgtctcagctacagcttcaactaaagcctcacgacatattcccaggttctcctttgagtactcaggcacatcaaacttatccacgcctccgctttcattccatctctttgccctctgctggatgacattgacatagcccacaaacttctcattctctctgattggcagatggaatggagctattttcttgccgtaaagctcctgcagctttaataccacatccttgaagcttgcattgtcgatatccatgtccgtaacgaaaatcatcctcgggagcttgtatttctcgcatatctcccatgctctttttgtgcctgtctgtatacctgccttgcctgaaaccacgatgattgcagcatctgcagccgatacagcttcttcaacctctcccacaaaatcaaaaaaaccaggagtatcgagaatatttattttgacattatcccactcaatcggtacaaccgatgtatgtatagagaactgacgctttatctcttccttgtcaaaatcgctgatagtgctgccatccgctacagtgcccattctggtggtctgtcctgccagatatgccatagcttccacgagtgatgtcttgccacagccgctatggcctaaaagcacgacgtttcgaatcttctcagtagtgtaaacattcatttcaagtacctccctgacattattatagtatgtaaacattgtactaatattttatataatttacaacacttttatgcaatctgattaatcataaatgacttttgaccctcatatcattattatattggaataaatatgccaataatttattgctttatagtgttaaattggatataatatattgtaaatattccgaaccactatagtgcgattttgagaatgttcgtgtggtgattctgaatagttacaataaagaattaggagatacacataaatgcattttgataaagttggctttatagggctcggtctgattggcggctcgatagccagaaaaatgaaagaaaataatccaaaggtctcaattatcgcaacagccgggcatcaacagaccatagaggatgcctttgggcttggcctgatatataataatgagcttttagagcttaactcatttaaagactgcgacgtaatctttctgtgtgcaccggtaaacaaaaatatcgaatacctcacacagcttaaggatatcataaaggatgactgtatcatcacagatgtaggcagcaccaaaacccagattcacgaaaaggtcatagagcttggccttgagcgcaattttatcggcggtcatcctatgaccggctctgaaaaaacaggcatactcaattcagacaagcagcttttggaaaacgcctactatattatcactcctactgcagcaactactgaagaaaatcagaatgatttcaaacagtttgtactttcactgggctcgatagctctcattttagactacagggagcacgatcatgctaccgcagccatcagccacctgccacacatgattgcatactctctcgtcaatctgattgagcatattgattccgaaaaagagaccatgaaaactatcgctgccggtggcttccgcgatgtgacacgtatcgccgcaagctcccctgtcatgtgggaaaacatatgtgaatccaacaaaaatcagctgctctcactcatggaccagtatgaagccaatttccataagcttcgcgaaataattgctgagggcagttctcaaaagatgattgattatttccaggattcaaagaattacagggattcactcacactgcccggtgccaaaatccgcaaggatttccacgaggtatttgtcgatattgccgatgaggcaggcggtattgcaatgcttgcaagccttttagccttcaacggcatcagcatcaagaacatcggcatcataaacaaccgtgagtttgaggagggtgtactgcgcatagagttctatgacgaagatgctcttgaatcagctatcagcgtacttaaagaaagaaactatactattcaccgcagatgatttatcctgttatatggttttaatcccaaaaacaacgagccgtaaaacgaattaaattcgttttacggctcgttttatatcgtccatgcagcactgtttacaaataagcagaaaacaataactctttattaatatacactctcctcaagtacctcatagaaatcctcaaaggtcttgcgacagcaataaggatctattatctcaaccccctctgccttaagccccggcaaagtaaatgacatggctacgcgatgatcgtcatacgttttaattttacaaggcttaatacactctgccggataaatccttaagccattttcagtttcttcaaccctcacacctaattccgccaggttttcctcaatggcgtttatcctgtcacactcctgcagacggatatgcgaaatgccttctatccctacaggctcctttgcaaacggtgcaatcgcagcaagtgtcagcgcctggtctgagaatgttgacaaatcccagctccctccatgtatatgagcattctttggtggcatacacactatgccgtctgcctcgtcggaaattgtgcagcccatatccgcaagcacatcaagaaatgccacatctccctgcaagctgttttggtgtacccccatcacctttgacttaacatgtaaaagcgggctcattgcataaaaatagcatgcagccgacacatccggctctatatcatattctaagctttcatacgccgctttcttagggataataaagctgttattctttttgtcctgcatcacatcaagcccaaactgcttcatcataagacgcgtcatctcaacatatgccataccatgcgttcctgtgacattaatcgtaaaagtcttttccatcaccatagccgagataagaagggcactcaaaaactggctgctcttgtctacgtttatatcaacagtatcagcatactcccctgtatttccgatggtaaaaggaaaatgatattcgttctcatcatactcaatatgggcacccagcttttcaagcgatacaagcagatccttcataggacgcttcttcatctgctcagaggacactatatggtatctgccctttgacagtccaagaagagctgtaagaaaacgcgcagcggtacctgcacttcccacatctatctcagcttcattctttggtatcctgcctccaaagcctgttattgttatttctcttttatcctcatccaccaaaaccggaaatcccagacgaatcagtgcatctataaaatgtctcgaatcatcactaaaaagacacccttttaaaacgctgcgcccgcttgcgagtgcagcgattaaaagggccctgtttgtgatactctttgagccaggtacactggttactatatcatgtggatgatttactttttttactttataaatcattgaaaatctgataaatatcaatcttgagtgcatcagtgtctgtcataccgataaacacagcaccatagtgatatactccttcttcactgtctgttcttcgtacaatctcgataaccgcatccacaacctccttggtccaaatttggatcctggtgtcataatatgtatgtatatcgagaggtatactttcaatcaacatattagtatatatgattgatttttacaagtaaaatttattcagctgcctcatcgtccatatgcatatcgtttgttataaacatcgcatcaccaaagctgaaaaacctgtatctttcctctacagcctctttgtatgcattgaggacatgctctctgcctgctaatgctgacacaagcatgacaagtgtagactgtggcagatggaaatttgtaatcagacagtcaatcaccttaaagctgtatcccggataaataaagatatccgtccatccgctgcactcttttagcatgccgttttcatcggatgctgcctctaaggtacgagtgcttgtagtgccaacagatattattctgccgccatttttctttgcattattaatcttgtctgcagcctcctgtgacaccatgtaaaactcagaatgcatatggtgatcaagcacattatccacctttaccggtctaaacgtgccaagccccacatgtaaagtcacctctgcaatatccacacccttatcttttacctgctgtaaaagctcctttgtgaaatgcagtcctgccgtaggcgcagcggccgagccgtcatactttgcatatactgtctggtagcggttcttgtcctttagctgatgtgtgatgtatggcggcaatggcatctgtccgagcttatcaagtatctcctcaaaaataccctcatagctaaactgaatcagcctgtttccatcatcaaccacatctattacttcacctgttaaaagtccgtcaccaaatataatccttgtgccctgctttgcctttttacccggctttacaagagtctcccatacgtcattttgtctgcgctttagaagaagtatctctatctttgccatagtgccttctttcacgccaaaaagacgtgcaggaattacctttgtattgttgagcacaaggcagtcgcccggtcttaaatatttaactatctccttgaacacatgatggctgacttctcctgtcttcttgtcaagcaccatgagtcttgagctggagcggtcctccagaggatcctgtgctattagctcctccggaagatcataatcaaaatcttttacgtccataattttcctattcctaacactatactaacatctaaccacgaagtgtgatacctgcagtctctttaagatgagcaagtatatcctttacaaagccctcgaccttcttagtcttaagctcctcatcctttggtgtaaatactacactgtacgccatgctcttcttattcggaggaagctgtacaccctcgtaaacatcaaacaatgtaacatctgagacataatcacaggcttccctgataccgttttcaatctgctcacatgtgatatccttgtccacaacaaaagcaaaatctctcttctcatcatcaaattttgagattggagtaaatactctgtcctttccataccactgtgaaagaactcttaaatcaagctccatcacatatgccggtactctcatgtcaagctcatcgcatatctcatatcttacctgaccgagatatccgattttttgtccgtcacagaatacctctgctgtctgatatggatgaaggaatggcttttgagccggcttgtatgtaaacttcacatcaagcgcatctgctacagtctcagccagtccctttatagtaaagaacgattcattctcaccgaatacgcctgcgcaaagtgtctctctctcatccggatactctgtaagcggaagctcctttgcgataaagatatttcccagctcaaagattcttccctccaggatacccttcttctggtttcttgccatggcataaagcatctcagaagcaagtgttgttctcataagcgagaggtcaacattgattgggtttataagcctgatagcatgtctttcaggtgcatcctccgggaatctgagcaaatcaagatcagcaggtgagaagaatgagtaatgtattccctcatacgcgcctgctgcacagagcacctcttttatcttgcgctctgtctgctgtctaaggttgagtcctccgagtgtaacctgtgccgtaggcatgaatgcaggaatgacatggtcatagccatacatacggataacctcctctgccacatccggataatcctccatatcctcacgatatgcaggaatcatgagtgtcagctcatcaccgcttacaaccggtgcaaagcctaaatttgtgagtattctcacaatatcctctgtaggtacctctattccaagcacaccattaacctttgcaatagaaaccttcatctcttttggctcaagcgaatttcctgtagtcacctcaacgtgagttgaagaaaccttaccacagccaagctcctccatcaggtgaagcgctctcttcatagccatggctgttgtgtactcgtttacaccctttgagtaaagtgcactcgaatcagaagcctgtcccagcgcacgagagctctttctgatattatctcttgcaaattttgcagattcaaacatcacctctgttgtaccgtcgttaatctcagaatttaagccgcccatgataccggcaagcgcaactgccttctttccgtcacagataacaaggttattgctgtttaattcaaattccttctcatcgagtgtgacaattttctctccatcgtttgcacgtcttactacaatctcctctccctcaaggtatgagtaatcaaaagcatgcattggctgtccgagctcttttaaaataaagttagtgatgtctaccacatttgagatagagcctattccaacaagtgcaagacgttttctcatccatgccggtgactcagagatttttacatcatgcacatagtgagctgtgtagcgagggcagatgtcctgtgccaggacagataccttgaaattttccttcttcacatcatcagcagtatagtcaagtgcaggctccttaagctcttttcccaaaacagcagcaacctctcttgccatgccatatatacactgacagtcaggtctgtttgctgtgattgcaatatcaaaaatccagtcatcaaggccgaggataggttttacatcatctcccaccttagcatcctcaggtaaaaccaaaagtccgttgtagcctgcacccggatagaggtcctcatttaagccaagctctacgcctgagcataacattccatatgaatcatatccacgcagcttgccctgctttatctccatcacgccctctattgtaacgtgatcctttgctgtggcatatactgttgcgccgataagcgcaagaggatatttgccccctgcctttacattgtccgctccacagcagatctgaaatgtgccatgtactccggcatttacctgacacaggcttaggtgtgtctccggaatcggctcacatttttctacaaggccgactactacgtttgagatatcctttcccacctcatatgattcctcaacctcgaaaccacatgagaataatttttcctctaactcctttggtgttacatctatatctacataatcttttaaccagctaagtggtgttaacataatttttgcctcctgttatatattcaagaaatgaatctagttgtcatcaatctggtctaataccctaaggtctgactcgaataaaagcttgatgttgttaattccgtatttgagcattgcaatacgctcaagaccgataccaaatgcaaatccgctgtactcatttgtgtctatgccacagccctcaagcacctttttatttaccacacctgcaccaagcacctcaatccagcctgtgcccttgcataaagagcagcccttgccgtggcactggaagcagcttacatcaacctctacagacggctctgtaaatgggaagtatgaaggacgaagacgtgttgtgacattctttccgaacatcttctttacaagctggtcaagcataccctttaaatcgcacagtgtgattcccttatctaccacaagaccctccatctgtgtgaacataggagaatgtgttgcatcatcatccgaacggaaaaccttacccggtgaaacaaccttgataggcggcttctttgcttccataacgtgaatctgtcctgctgaggtctgtgtacgcagtaagaactcaggtgataagtagaatgtatcctgcatatcacgggccggatgatcctttggagtatttaaagctgtaaaattatagtaatcattctcgatttctgtaccctcgtaaacctcaaagcccatagatgtgaaaatctctgagagctggttttttacctgtgttacaggatgaagattaccctttttgcttctctttgcaggcatagtgacatctattttctcgctctcatacttgcgcttaagtgcctctgcctcaaatttcttaaccttctcatcaagaagcttctcaactgcctcacgtgtctcattgacccactggcctacctttggtctgtcctccggagcaacatccttcatgccctttaagactgctgtgagctcacccttctttccaagaattgcagcacgcacatcatttaatttttcaaggccgtcagccttatcaatttcagcaagtgctttttctctgatctgttgaattttgtctctcatcgaatttcacctcataatatttttcttaatttgcataaactcgtaacttcaagcttgaattcgccgtttatgcgataaaaaacgtccctgcatggctattaaaccatgcagggacgaaaattccgcgataccaccctgatttccattgaagaaatatccaatggactctcattgatatgtgtaacgtacataacacgtcatgaactactgtgcttcatccatgcagcttcagtgtgaacttcaatcaatagcctttttgtaagactgctttcagccgatgacaatctctctctggtcaaagtactataatctactatgcaccttcattgcttttattatatatagctgcgacatatatatcgcaaatgcttatgtcttaataacacataagtcattttagcacaatctctatattttgcaagtagaaaattttatatttgatttatattttatttctaagccccttaggataatggtttttaacctgtgtgccattcaccttaccccagccggccgtgtatccgtccacacatacaagtgcccagccctttttgcattcagccgcctgctcatcagataacataactgactgaccattgaaaaaaccgatagtctgcggatcatcccaggtaagctttactacgtttttagcctcacttagcttaagcgcaagcgcaagcgaatgcgacggctcaaagcgctgttttttgaactctcctatatgaagccctgcgcgctgcaccttaagccctttaatatccacttccatatcaggcagtctgtagagctgctccccaaacatgacaagccttgagttttttatccatgctgccatatcctctgatatggtctcatcaagaaactctgtgagaagcttcatattttcttttgtgagagccggctttgtttcgtttttcctgttcttactatttttgttcttttttgttttcctgtcagctttaaggcctgtgtcctctactttattacagctatcctcgcataaatcataatccgcaccaagctcattaacactgcctcttctcacaagctttgccacaaaatgcccctctccgtccaccttatgcggccagaagcgctccatttcttctagtgtaaaatcaggatgtctctccaaaaaatactcaattacatcctcattttcttccttcgagaatgtgcaggtgctgtatactatcacgcctcccggcttaagcatcaccgcggcattatccagtatttccttctgccttgtcgcacagattgccacattttccatactccactgctctattgcctcaggcagctttcgaaacattccctctcctgagcagggtgcatccacctgtatagcattaaaaaagcctgggaaatgtgaagcaagcacaaagctgtcctcatttgtcacaatcgcatttttgattcccatacgctctatattctgcgacaaaatccggcttctttgtgtgttaatctcatttgataccaaaagtcctctgtctcctaaatatgtggcaagctgtgtgctctttccaccgggtgccgcacacaggtcaagcactctcatacccggctttggagctaaaagtgccgccgccgacatggcacttggctcctgtatgtagtaaagtcccatctcatgatacggatgctttcccggacgcacattctcatcaaagtaatatgcctcatctgcccacgaaacccttttatctgaagaaattccaagtaccttcaatatccgcattctttcttccgggctttgtacctttaatgtattaaatctgagtgcctgaaatctgttattgtcatagctgtataagaaatcatcccactcattgcccagaaaggccttcatctttttttcaaactctatcggtaaattcatcatcaaatcctcttgttttcttacgaaataattacaatgtatcttactatcacacacatagtcatgtatctaagcacttcgatattaccacatttctactatccatgctatcaattttttgtaggcatatcactgctcactacatacactgcttatatccaccactgtcacatccttataataatatccgattatatccttatagctgcttcctgcctttgccagcttgtctgccccatactggctaaagcctattccatggccgaagcctccgccggacagtgtatagtgaccatttgcaccggcactcacactaaagcaggcgcttggtatcatcgacatattctccctcacagagccatcgtttaatgtaacttttttctgataatgccctaacgcctttcttatatcattctccgccgtaatggtctgcgatttgtttccgtaatttattgtgagcgaaagtacataaccagcatccgacgtcttatcgacagaaatacctgttgctgtgccatactgaggatcattgtatgccgataaatcaagctccgaggtccatctgtagtatggcgaattgtcatccaccgactccaccttgtgtatgaaatccggtgtactcgaagaccatacctccatatcctcggtttttccggcagacgtagaaaaataataacacgttattaagctccttccgcatgagacaacctgccctgccgtagcttttacagcctcatcggtcgactgctttgtttctgaagcgttatagacctgaaaagctgtggtattgtcaatatttgctccgtatagcgcatactgtgtatttttcatctgtgaatatacaaaggttcttgcgcaaacagcctgagccttaagcgcctctgcatcaaatgtagacggcatctccgacggcagcacatagcgcacatatgtctccacatcgactgtattcaccgccacaataccttcctctgtcccgataaactcaaatgagcccggatagttcttaccgtttatgctgacataattgtccactgagctcacctttatccggcttttttgtgcatttgccatatatgcacccacatcgtcaatagcattgcttccacagtcagcatcatccacataaaggttagctgcggcagctgccgcaattgttggaaatgcatcctttccatcgttttttataagcactcttatgtatgtaaggtcaggtacctgtcttctgacaatggcacatatcctgccggaatcaagtatgtaagaaagtgtttcacttccgattatcaggtcagaaaccgctatttccttaggtgaagtgcctgtctcatcatacaccggcagcttgtctgactgcattggaatgtcaccctgccctgcaatctgcatggtaccgtctccgtacgacagcatcacacctgatatatcatccggctttatctgtatctttttgaccttagagccactgatttcaatatcacagacacctgtaaagttctcttccatggtaccctttgccctgtatagatctccatcacatatgaaaatcagccttccatcgtcatttgacacaatatatgcattctcatacaccatatccttcgtcacagccctcgcctgttttacaagtgtccctttttccttttgtaccataacaattgcaaaaacaataaccacgcataccatggttatcgcaagcattatccagaccatctgattcggcttttgccgtcttcgtcttctatttgccaaatttctgttctccttaacacccaaatagtggttactgctcaaaaaatgggagctgcaaaaacagctccctttatcatctgtacctaagaatcctttgtgctttaaaaatcttttgtatctcataaagcttttgtacgtccggagttcttttgtacattattattcttttgtaagaacccaaaatgccggccctgtaatttagactcctagcgctcttgctaggtgggtaaccgcagtctgccttctgccttccgctgcataatgacggcctgacatccaacagctcatataggaatcccgtttaaagtaaatgtaggttctaaatacacagggttgtcgaacatctcaggtatctttgtaaattcattatactttattatgtctcatgttgcaatgcaaaattcatgttagaatttaacaaatttttctctggcatttcgtaacatatttgaaaaccagataattactgcgacgaatataatcatctccacatatgaccagtacggtatttttttgaggcaatccgaaactatcgcaactatactgataaccaaaatcacaatgccgaatacaagcgactttggataaatataagctatatatccggccgtatcctttatctttttcatttcatcctcagccacaaatgtgctttcaattttgccgcttttcttcattcgtagtgacacaaatattatgtaaattcctaatatcagcgtgaccgcatctattataataaaatagttcatgcttctttctcctgtatctttatttattattcctaaatagttaccacggattttatgattaaagggtcaaaatacctttttaccctcatatcattttatttataaaaaaaatatgtaaaatcatcaaaactagtataacctcatgtcaggaaaaaataaatagtaaataagtcccacctgtttcttaaatttcttttattaatgtagtaaagagtatacatgatttttgcagtaatctgataattattcactctatgattagagcacaaaaagaacatctgcaaacagcagatgttcttttatgttgcgctatatataattatatatcaggccagttacaattatatgattaaagggccaaagggtaacaatatattattactgcacaccgagcattttcttaacagtgttttccatctgatccacatcacagactgtgttgtgaagaatctttgcatccctgatttcctcgatggcatttggtaccttaaccttgccgagctttgaaagctcatcaacaagctcaaagtctgtcattgaatcgtacttaggatcaattgcatccatcacacttcttgtgaatttgaacgggcttgctgtagatgcgataactgtctttgtggctgtatcacctgtagcctccttatacttgtcatatacacctgctgcaactgctgtatgagtatcaataatgtatcctgtatcctcgtaaagctttttgatgacctcagcggtttccttctcacttgtgtaatttccatagaaatcagaaagcttttccttcatctcaggtgttacagtgtatttgccatccttagcaagtgaagccataagctgagcattcttatttgcatcatttcctgcgatacggtaaatgagtctctcaaggtttgaagagatgagaatatccatggatggtgaatttgtgaggataaactctctgtttttatcatactctcctgttgtgaagaaatcataaagcaccttattctcgtttgaggcgcagataagctttgcaacaggaagtcccatattctttgcataaaacgctgcaagtatatttccaaaatttcccgtaggaacaacgatatttatcttctcatcctttgcgacagctccctgtgcaaaaagctttgagtaagcatatacatagtacacaatctgtggtacaagacgacctatattgattgagttggcagatgagaactgatagcctgcggcatccattgtctctgcaagagccttatcattgaacatagcctttactgctgactgtgcctggtcaaagttgccgtgaatacccactacatgagtattggcacccttttgtgtaagcatctgcttctcctgaatcgggctgacaccattctttggatagaaaacgataatctgtgtaccctcaacatcagcaaagcctgccatagctgcctttcctgtgtctcctgatgtggctgtcaggatgacaatctcgtttttaacattgtttttctttgcagatgtgataagtaaatgaggcagaatggataatgccatatccttgaaggctattgtagagccatggaacagctcaaggtagtaagccccgtcagcaaacttaagcggtgcaatctcagtagtatcaaacttgctgtcgtatgccctgttgatacaatttttaagctcttcctctgtgaaatccgtaaggaaaagcttcataacctcatatgctacctgctggtatgacatcttagaaagctcctcaatagaaacatcaagtgccggaatgctctcaggtacaaataatcctccgtcatcggcaagacccttaaggatagcctgtgaagctgttattttcttttcactgtttcttgtgcttgaatataataaatccattttttacctcatttctctttttatcttatctaaatccatattgcagcatctctatatgcagacaattattatcatttatagtataataaatttcatatatcaaatcaataacaaaaatgctacaatttatttgtaaacaacattacttttaatattgtactaaaaactcccgcggttatataacctcgggaatttttataattacttctgatttatatagtttacaagtccctcgcagtcgataattttctgcatgaacggtgggaaagcctgtcccttaaacttctctcctgttgtctcatctgtgatgataccggaatcaaagtccactgtcacctcatcaccggcatttattgcctttgctgcctcagggcactcgataataggaagacctatattgattgcatttctgtagaaaattcttgcaaatgtctctgcgataacacagcttacgccggcagccttgatggcaatcggtgcatgctctcttgatgaaccacagccgaagttcttgttggctaccatgatatccccagcctttacattatttacaaaatccttgtcgatatcctccatgcagtgtgttgcaagctccttaggatcagaagaattcagatatcttgcgggaatgattacatctgtatcgacattgtctccatatttaaatacacgaccgtgtgctgctttcattgtgcttcctccaatctttacataacatcctttggtcctgaaatcttacctgtaatggcacttgcagctgcaacagcagggcttgccagataaacctcagaatccacatgacccatacgtccgacaaagttacggtttgtggtagatacgcatctctcgccctcagcgagcactcccatgtatccgccaagacatggtccgcaggtaggtgtgctcacaatggcaccagcctcgataaatgtcttaagaaggccctcttccatagcctgaagataaatcttttgtgttgcaggaatcacgataaccctgataccatccgcaacctttttaccctcaagaatctttgctgcaatacgcagatcatccatacggccgttggtacatgagccgattactacctggtcaatctttacatcgcccacctcatcgatggtacgtgtattgtcaggcagatgtgggaatgaaactgtagacttaagtgtgctaaggtcgattgtatactcctcatcatactctgcatcactatcagcctcatactctgtgaacggacgctttgaatgctccttcatgtactctcttgtgagatcatctacagggaagataccattcttgccgccggcctcaattgccatattggcgatagtaaatctgtcgtccatagaaagatatttaagtccatctccgacaaactccattgacttataaagtgcgccgtccacaccaatcataccgatgatatgaaggataacatctttaccgctgatccactcagccggttttccgacaatattgaacttgatagcagaaggcaccttaaaccaggccttgcctgtagccattcctgctgccatatcagtgcttcccacacctgtagagaaggctcctaaagctccgtatgtacatgtatgtgaatcggctcctataatcacatcacctgccacggtaagtccctgctcaggtaaaagtgcatgctcgatgcccatttttcctacatcaaagtaatttgtaatctcgtttttgcatgcaaactcgcgaacacatttacagtgttctgctgacttgatgtccttgtttggtgcaaagtgatccataacgagtgcgattttatctttattaaacactccctctaccttcatcttgtcgatctcatgaatcgctacaggtgaggtaatgtcgtttccaagcacaagatctaaatcagcctcaatgagctgtcctgcactaacagagtcaaggcctgcgtgtgcagcaagaatcttctgtgtcattgtcattcccatgcttatattcctcctagcatataaaaatattgtattatgattgtatctgaatcaagtttacttaagacatcataacatatgattttccataataaaaatacataataaacatatttaccataactaaatatcatggtataataaacacagatttgttgatgttcacacctttttgtgacaagcaacgattacagccattaaaagtacaaaccacaggaggtacaaatgaaccagaatctctcatcttactggattttctatactgtcgccaatgccggcaatatatcaaaggcagccaaggagctctatatcagccagcctgccatcagcaagtcaattcaaaagcttgaggacggactggaatgcaagcttttttccagaagctccagaggtgtcgtcttgaccgatgagggcaggcttctttatgatcatgtaagcgaggcctttgaggcattaaatgagggggaggaaaagctgaagcgctcaatagagctcggtgtcggccagcttaagattggtgtcagctcaacactctgcaaatatatgcttttgccatatctcaaggaattcatacacagaaatcctcatataagcatctcaatcgaatgtcagtccaccaatgagaccttaaagctcctcgatgatgacaaaatagatataggtctgattggaaaaccagcatcccttaagactttcaatttctattatctggacaacatcgaggatatatttgtcactacaaaggactatctgcgcaacttaagcgcccgtggtgtcaaaaagagcgagattttgcaaaactctactctcatgcttctcgataaaggcaatatgacacgtaaatatattgatgattatctgcaggagaaccagatacacgtaaaggactctatagatatatcaaatatggacctgctcatcgactttgccaaaataggcgtaggtgtggcctgcgtcataaaaagcatagtttcaaaagagcttgctgacggtaccctgattgaaattcctctcggcataccaatccacaagcgtgaggttggctttgcttacaaggagtcttcaaagctttccacctctttacagacctttatcaagttttatgagagctacacaccagaggatttttaaataacaaaatatgaccccggaggtattaccttgaaagaacaaatacacactatccccatatcagacgcctttgacaatgccggcgaatgccccttctgctatatagaaaaacgcactgaggatcacgtcatggattttgtacttggtcatggtgcctcttacatggaggctgacatacgcgatatgaccgataaggaaggcttctgccgtgcacatttcaaaaaaatgtttgactatggcaattcactcggaaacgcctggatactaaaaaccatgtacatgcgccatattgaggagatggacaaagaatttaagaactttaagcctgattcagtgcaaaggagcggtcttttcaaaaaagcaaacgcctcctccaattccatcgtggactggattaacaagcgtgaatcaacctgctttatatgcgacagcgtaaacaagacctttaatgcatacatgaagaccttcttcactatgtatgaaaaggatcctgaactaaaagaaaaattaaagaacacaaaaggattttgtctcgatcacctgaaagtggttctggaaggagctgacacttatttaaaaggtgataagcgcaaagaattttacgatatcgtgctccctctaatgcacgacaacatgaaccgcatatatgaagatgttgcatggttcatcgaaaaatatgattataaaaataaagatgccgactggaaagattccaaggatgcgatccagcgcggtatgcagaagcttcgcggaagtgatccatcacttccaccacatgttctgaaaaaataaaatcacccggtattctgccggccgtctagtggctgtgcaaaataccgggtaatttttatttcattacgatgtttacaatacgtcccggaacataaatctcttttacgatatttcctgtaagcttatctgcaataacatcctttgcttttgcaataacctcatccttaggatcctgttttccgatttcaagagtgcccttagtctttccgttgatctgtacagcaatctctactgtatcctcaacagtctttgcctcatcgtataccggccatggctcaaatgcgattgtatcgtcatgtcccattctctgccagatttcctcaccaacatgtggacatacacaagaaagcatcttgataagcccctctgcaaactctctaggacatctgcctgccttgtatacttcattgacaaaaatcatcatctggctgatagctgtattgtagccaagtgcctcgaagtcgtttgtgaccttctttactgtctgatgatagattcttgtgagctttccatcatcctcttcgataatattctcaggctctgtaaagaaattccatacacgtgtgatgaatctctttgctccctgtacgttgctatcattccaaggctttgaaacctcaagtggtcccatgaacatctcgtagagacgaagtgtgtcagcgccgtactcctcgactacatcactaggatttactacgaactccgggaatctcttgcccatcttgataccgtttgatccaaggatcattccctgatgtacgagcttcttaaaaggctcctttacaggagataagccctgatcaaagaggaatctgttccagattcttgaatacatgaggtgtcctaccgcatgctccggtccaccaacatagagatctacaggcatccagtgctttaagagctcctgatttgcaaattccttatcattgtgtggatcgatatatctcatataataccatgaggatcctgccgagccaggcatagtggatgtctcacgagtaccctttacgccgtttctgtcatactgcttccactctgtagcgttctcaagaggtgccttgccattcttgcccttgtaatcctcaagctcaggaaggacaagcggaagctcatcatcaggaaggaaatagattgaaccatcctccttgtatacacatggaacaggctctccccagtatctctgacgtgcaaaaatccactcacggaacttgtagtttacagttctctttgccacgcccatcttctcaagcttggctgtgatagcttccttagcatcctcaactaccattccggtaaactcctctgagttgatgagcttgcagccctttccaaggtaatcatgcttctcaaatgcatgctctgatacatctgcaccatcaattacctgaatcatctcaatatcatgagcctgtgcatactcgaaatctcgctgatcatgggtaggaactgccataacagcacctgtaccatagcttgccagtacgaaatcaccgatgaacatgcgcacttccttgccgtttacagggttgatacaatgaagtcccttaagctcacagcctgactttgtcttgttaagctcagttctgtccatatcgctcttctttacagtctcatctatgtaagcctgaacctcttctttgttctcgactctgtccatgagaccctttactatatctccgtccggagcaagcaccataaatgtgataccatatattgtctcgatacatgtagtaaagatagagaactctccaccgcctacaatctggaatttgacctcgacacctgtactcttgccaatccagtttctctgcatttccttggtagactcaggccagtctatctcatcaagcccctcaaggagcttttctgcaaatgccggctggtcaataacccactgtttcatgttcttgcggactacaggatagccgccacgctctgacttgccatctataacctcatcgtttgagagaactgttccaagctcctcgcaccagtttacaggcatatcaatatgctttgcatatccggcctcataaagcttcttgaaaatccactgtgtccacttgtaaaactcagggtcacttgtggaaatcatctttgaccagtcataatcaaaaccaagctctcttaactgctttgagaaggtctctatattcttctgagtgaaaccgtttggatgatgacctgtgtttacagcatactgctctgccggtaaaccgaatgaatcatatcccatcggatgaagtacattgtagccctgcattctcttcatacgcgacatgatatctgtagctgtatagccctccggatgtccagcgtgaaggcctactcctgaagggtaagggaacatatcaagtgcatagtatttaggctttgaaaaatcccaaacatctgtcttgaatgtctcgtgttctttccagtattcctgccattttttctctatggccttgtgattgtatggttctgacatacttgcctccttatatcaaaaacgctccgcctctcaaagagacgaaggcgtatttttaatccgtctgattaacattcataattttacacatcacactatattttgtcaagttttgctatataaaaaacccggtgcatcactgccccgggtcttattgccatatatatctgacagattagttgttgatgagcttgtcgctctcatcattccagctgtaaagcttacggatttcctcaccaaccttctctgaaggatgctcagaagcaagctttctcatagccttgaaatgtacctgacgtcctgctggtgacatatcaagtaagaactccttagcaaatgtaccatcctggatgtcagaaagaatcttcttcatagctttctttgtctcagctgtaacaatcttaggtcctgttacataatcaccatactcagctgtattagagatagagtatctcatacctgcgaagcctgactggtagataaggtctacgatgagcttcatctcatggatacactcgaagtatgcgtttcttgggtcataaccagcctcacacagtgtttcgaaaccagcctgcataagtgcacaaacaccaccacaaagaactgcctgctcaccgaagaggtctgtctctgtctctgtacggaatgttgtctcaagaagtccggctcttgctccgccgattccaagaccatatgcaagtgcaaggtcccatgcctttcctgtagcatcctgctctacagcgataagacaaggtgttccttttcctgcctggtactctgaacgtactgtatgtcccggagccttaggtgcgatcatagctacatctacatcctttggtggcttaatgcatccaaagtggatgttgaagccgtgagcgaacataagcatgttgcccggctcaaggtttggctcgatgtccttcttgtacatatctgcctgtaactcatcatttataagaatcatgatgatatcagcctgctttgcagcctctgcagcaacatataccttgaatccctgctcttctgctttcttccatgacttgctgccctcataaagaccgatgatgacattgcatcctgaatcctttaagttaagtgcatgtgcatgtccctggctgccgtaaccgataatggcaattgtcttgccctctaataatgaaaggttacaatcatcctgataaaataatcttggttctgccattttgttttcctcctgttaatttaagtaaactatttatatgtaaggattgtcctgtgactaatccaacataactacatcatcggaacctctggtaagtcctgtgattcccgttcttgcgagctctaatatctcatagccgctaagtaagtctatgaacttatcaagcttgtcctgtgtacctatgagctcaataatcatagagtcatgagtgacatcaactatcttgccgtggaagatctcagtcacattcataactgcctgtctttgtgtatcgagtgctcttatctttatcataataagctccctgcacactgagagtcccggctcaagcttcttgatatcaagtacatcctcaagcttcgccaactgcttctctatctgctcaagcacctgctcatcaccgcttgcaacaattgtgatacgtgtgtagcgcggatctgctgtaacccctgaggagaaactatcaatattaaatcccctgcgactaaacagtcctgaaatacgactggtcactccgggattgttctcaactaaaagagataatgcctgtcttctcatcgaaaaaccttcctcacaatttctattatttctgttcacatgatgataatattactataatctgtatttgtcaagcaatatcgttaatataacttaaattcatattatcaataacaatatttatacatccataacctcgataaatgcctgttttataacgttttatacagtatcttcaaaaaaagccgggcgacatacaccgcccggctttagaattatctaatataattctgttgtaatatattataactgtggtcctgctgcaacaagtgctttaccagcctcatttgttgtgtacttaacaaagttcttgttgaatctctctgcaagatctttagcctttgcctcccactcagaagcatcagcatatgtgtcacgaggatcaaggattcctgaatcaactcccggaagctctgtaggaacctcgaaatcgaacatagggatcttctttgttggagcatcaaggatagcaccagaaaggatagcgtcgatgattcctcttgtatccttgattgtgattctctttcctgttccgttccatcctgtatttacaaggtatgccttagcaccgctcttctccatcttcttaacgagctctgcagcgtattttgtaggatgaagctcaaggaatgcctgtccgaagcaagctgagaatgtaggtgttggctcagtaattccacgctctgttcctgcaagctttgcagtaaatcctgaaaggaagtagtactgtgtctgctcaggtgtaagaatagatactggtggaagtactccgaatgcatctgctgaaaggaagattacgttctttgcagccggtgctgaagatactggcttaacaatatttgtgatgtggttgattgggtaagatacacgtgtattctctgttacactcttgtcctcgaaatcaatctttccatcatcagcaactgtaacgttctcaagaagagcatctcttctgattgcgttgtagatatcaggctcagactctttgtcaagaccgataaccttagcgtagcatccaccctcgaagttgaatacgccgttgtcatcccagccgtgctcgtcatctccgataagaagacgcttaggatctgtagaaagtgttgtcttacctgttcctgaaagaccgaagaagattgctgtgttctctccgttcatgtcagcgtttgctgaacagtgcattgaagcgatgcccttaagtgggaggaagtagttcatcatagagaacatacccttcttcatctctccgccgtaccatgtattgatgataacctgctcttttgatgtgatgttgaatgcaacacatgtctctgagttaagtcctaactctttgtagttttctacttttgcttttgaagcattgtaaactacgaaatcaggctcgaagctctcaagctcctctgctgatggcttgatgaacatgtttgttacaaaatgagcctgccaagcaacctcaacgatgaaacgaacagccatacgtgtatccttgtttgctccacagaatgcatctactacgaaaagcttcttgttgcagagctctttcttagcaagatccttaactgttgcccaaacatcctctttcattggatggttgtcgtttggatactcaggtgtattccaccatactgtgtccttagaattctcgtccataacgatatatttatctttaggagaacgtccagtgtagatacctgtcttaacgttaactgcaccaagctctgtctccttaccaacctcgtaaccctcaaggccggcttttgtctcctcctcgaataatgtctcgtaagaaggattgtgaacgatctctgttgttccggtaatgccatactttgttaaatcaacatttgccatttgaataaacctcttttctataaattatggatttacatccatttcttttgttagtatatatgtttgttaaaaaaaaatcaatatctacttttcaatttacacttatttcacactttttcgacatgcataatatatttctcacacatcagccgttcgcatatctggtgagaaactgcctggtacgctcctccttcggatggtcaatcacctcatgcgggtcgccatgctcaacaatcacaccaccatccataaagatcacctgatctgctacatcgcgcgcaaaggccatctcatgtgtaacaataatcattgtggtattctgctgcgcaagggaacggatgaccttgagcacctctcctgtaagctccgggtcaagagccgatgtaggctcatcaaagcagagtatatcaggcttaagcgccagtgcccttgctatagctacacgctgttgctgtccacctgagagctgatgcggataatggttcatcctctcagcaagccccattctgtccagaagctcctttccatgctcatcaatacgtgtaaggattgcttttttatcctttttaaactcaggtgtctcctgtgccagaaggcgctctgccagagtgacattctcaagtgccgtgtactgcggaaaaagattaaactgctgaaacaccataccaaaatgcagcctctttttgcgaagctcggcgtctttatccttgcccgcttcggaagcatcaaaaagagtctcaccatttacaataatctggccactgtcaggcctctcaaggaaattgagacaccgtaacagtgtagtctttcctgagcctgatgaaccgattatcgcaagagcattgccctcctccatggaaaagctgacatccttaagcacattagtccttccaaaatgtttttctatatttctaacctctaaaattgccatgtcttcctcctacctgaaataatccagctttttctcgatataattaaataaaagtgtaaggattccgacaaatacgagataaaatacacctgtataaaacagcggccatgtaagtccgtcagacttcataaacgccgctcccgcaaaggtaagctcgtatgccgcaataattctggcaagagaagtatcctttacaagagtgattatctcatttgacataggcggaacaacacgcttgatcatctgaagcagagtgattttaaagaaaatctgctgctttgtcatgcctaacacctgtcctgcctctctctgaccggccggaacaccctctatgccacctctgaatataacagagaaataacatgcatagttgatgacaaacgctacaaccgtcgctgtaatacgtccggtctcgtcaccactccatatagcctgatgaagccacaagcccggtccgtagaatataatgataagctgaagcataagcggtgtgccgcggataacccatacaaacacattcatgacagccttgacaggcttaaacctgctcaaaagcccaaatgcaaatataagtcccagtggcagtgcaaatataagtgtcagtataaatatttcaaaggtggtccacagaccactcattagtgcttgtgtaacattccagaacattttatttctcccgctcaacaactacctgtgcattgttacagtatgcatttgtgcattccatagactttgtaacctcatctgtgagtgtcatgccattccagacaacgtcaatcttctttgaatcaagctccataaccttgttgtcccagtcgataactacaaattcaacatccacgccgagcttctcacctacaagtctagccatatctgcatcaaagccaatccatttgtcatccttatccttgtaatccataggctcaaactctgtgataccgacaatcatcttgccctgtgacttgatataatccacatcactgtcgctgtcagactgcttgaactcgcaaggctcctgctcaagaagtgaatcctgtactccgtatttctttgcaatctcctgcgcgctgccgtcagcatatgaatctgcgagtacactgttgatatatgaagcaagatcagaacccttacggcatccgacaccatacttctctgatgtaagctctgttgtatgtactaaatcagggtagcttgtgccctctccaatcatggctcctgccattaaaaggtctatgattgccgcatcagatgtacctgatttaacctccataagcgcatcagcctgtgatgaaaccgaattgtaattaaagcccttttcctttgccacagcctctcctgctgagcctgcctcaactgcgtaggtcatgccgtcgcccttttcgcttttttgtgttcctgcacccttgctgccaccacaggcagtcattgaaagtgctaaagttgctgtcaaaagaagtgctaatcctcttctcatactcatttcctccatatgttaaataatcattgtaattattcaaaatcatccaataactacaaccttttaacatattagcaaattatcacgctaaagtaaagaggaattatccaccaaatcaacagttatgttcttccattttatacaagccccagacttttaattatataaagccagagtgtcagcgtaaacgcactgagcagtgtcgtgagcattatcgtggtcgatgaaatgacgccctcatgccccatgttccttgccatcacaaagcagctcactgtagttgctgagccaagcatcacaagaattgcaataagctcactgtccctgaacccgaaggctaccgcaataggaagaaatactgccacaaagcctacaagcttgataaatgtggctgcaaatgccggctttgcctttgctgatgcttttttcaaatcaaaggtggcacccatggccataagccccataggtgttgccatattgccaatgctcgtcacagcctttgccggtattcccgcaaacggcagacctatagctgaccacagaaggcctgcaacaattcctaaaataataggattggtcactattcccttaaatgtctttttgagcactgccttgtctatgccgttttgccccggcttaaaaaatgaaagcactataacagccatcacgttgtaaagcggtacgcttcctataatcatgactggtgccatgcctgcgtttccataaatgttctggataaaagcaattccaagcagcgcagcactgcttctgtatgaggcctgtataaactcgccccgtatagatttatccctccacaaacaggaaacaagtgttgatattgtaatgcttatcaacgtaaccacaaagcagaatactataaatttaatgttccaaacccttgaaaaatcaactgacgcaagatcactaaacagtaaaaaaggtaaaggtatcttaaacacaaacttattcatcctgtttgcaaagtcttcgtccaaaatccccaccttgcgaagaaaaagtccaaacaccatcatcagaaaaataggtcctgtggcatttagacaaaacattaaattttccatctcaaattaagcctccgtcatatcagtaatctgtagtttataattatactattttgtacattccagctaccacaataagctttgaactgagatatgtcaaccttttattgcactgtagattattttaaaaaattatggtacacttatcgcatattttatttaggaaggaattaaacggtttgaaaattcttattttatcctgtgacaccggcgagggacacaacagtgccggtaaagctataaaagaagcggcagagcataaaggacattctgtgacaatgatagatatgtttctcttatcgggtaaaggaacatcgcacgcagtatcaggagcatatataggcattgtaaagcatattccgtttttcttcggactactctataaggttggcatgctgatatcgagtgataaacgtaaatcccccgtctattttgccaatgccctgctttgtaaaaagctatcagcatacattgaatcaaacggctttgatgctgttgtcacacctcatctgtaccctgctgagaccctgagctgcatgaagcgaaaaaatctgcttcatatccctgccgtcgctgtgggaaccgactacacctgtatcccattctgggaagagacaaatatggattattatgttattccacacgatgatctgaccgatgaatttgcaaaacgtggtatccctgaaaacaagctgctgccattaggcatcccggtacgacaggccttctgtacaaggactgctaaagctgctgcaagaacaagattacatctgccatccgatgtgcctatctttcttgtgatgagtggcagcatgggttttggcaagcttgctgtcttcgccgcagagcttgcaataagatgccataataatgagcatattgtaatcatttgcggcaacaatactaaaataaaacgcatactgcaaaatgagtttaagttcaacaaacgtgtacacgtaataggctacaccaatcaggtttcacttttcatggatgcctgtgatgtaatttatacaaagcccggcggcctcacatcaactgaggcacttgtaaaaaatataccgattgtacacactgctccaatccccggatgcgaggcagcaaatgttgcatttttcaaaaaacgtcatctgtctgtctcatcaaagcgtctgtcaaagcagattgagcttggaaaaataatgatagaaaataaagagctaaatgcagaaatgatacgtgcacagcgccgtgagcgaaagccctatgctgccatacagattgttggtctgcttgaagaactgactcacactgatacaactgactgactataaaaccatgtaactataaaactataaggaaattatcatgctatattttttatttacactcttaggcttcgtactcggaagcactctctttgcttactggataccaaaactattaaaaaacattgacatctgcacacttcccgatgaccacaatccgggtgtgagcaacgcatttatgtatggtggctttttatgcggaatactctcactcatatgtgagcttgcaaaaggatttatcccggtgtatattggtcagaaatgcttagatataaactcacttctgtttgtacctgttttagttgcacctgtctttggacatgcatttccttttttacaaaaacaaaaaggcggtaaagctattaccgcctccttcggagtccttttgggcctgtttccggaattgcatccagctgtctatctagcatttttctttatattcttttcagttgtagtaataataaatccacattcgctcagatctattctgacatttggtttttttgcattcaatgtccttttgactataaaaacagcctcaatccagattggctgcttcataatcgcagtgattgtgatatacagacacctgataaagcacaataacggaccggtaagtataagtatactgcatcagcggtaattatggtatctgcttttactcattgattttgcttcttacataactgtttattttcatacatataagaatcagcactatcaaataatatttgtaatgtactctccttataatcctccgatatcgcccatccgcaagcgtaatcaatgggaacaggctgtattatttatacaatcgttgcatatactgtcggatggataggaggaacaagttctatccttcacggaattattgcagccatatttcaaatagctttggcatttataatttggggaggcttcatgcttcactatcgcaatgatgtcagaaaaatgaatgaaaaaatcaaggaattatagacttattcatggaatttaaatccaaaggaagagagggctcattgtccctctctcttctcaatcaactgcctgtaaaataaataatttcttgtaaaaataattcccgctgatgccagtgccagacccagcccggaataaaaaatgccggcaatcagtagcaacgttttttttctttacacaaaatttatctttcatctgcgttctccctatactctcttaaatactccatttacataattcgtttcccatcatatgattatcttaagctatttcttttttcattgccttgtagccaattaatactgtccacacatatgcacaggtttttggaatcatcagcatgccgatcatcggaattacatcagccagcagtacaaccggaatataaaatgcaaagctcaggacgattgtcagccacatccaacgaaaagagctatcattattttcttttgcacttttatagaataaaactatgataattaatcccatcagtgcaaacggaatatttcggtaaattccccatgaaagcggagaatctgcactgagccaggcattctgaggcatcatacacagaacaattcttaatcctgcaagaccataaatagctgctgtagctgctttatagcctttaatctgataacgctcacgccatatatgatagagaacaacataaaaaatagtcatagtgacagaggttatccacttgcctaacccaagctgtacagtaaagttctcaagacctgttgtacaaagcgctgcagcacgaggaaccagatgaaatgcatctccacttcctaaaataactgacataattccaaacatggtaaactgacggttccctttgctttttcgaatcattaaaattccgattgtgattaccgaaaacaaatatacggtatcaaataaagtttctacaattgcctgcataataaaaatcctttctacttagatacatctttaaacatataagtgaacactgttcattttgtttcaaaaattttcccacactctaatgtgggagaattttaatataatgttttgttaatcaacatcaaaatcgaagacggattataatcctgacgaatcattgataccaatattaaagaaaataatatatctgcaaactgtttttccgtgaattgttcatcaaatacatctggacgaatcttacgatcattctttaatatatcgcataatccattaagaatatgcccccatgtctgcagcattttcttctttccatccgttttttcatccttcataaatccaagcgaatgcagagaaaagaagcccggaaattgctcatttccatattccagtcttttataaatccatgagatacaggcagcaacatcgttaaatgcctgctcatcctcagggttaaaaaagatttcacgccaaatactctcaattgtatccccaagcaaatcggccttggattcatagtaattgtagattgtccccgccgaaacagaacatcgggatgcaacagctcgtatgcttaaagcagtccatccgttttctttgattagctctctgcttgcagctaatatgtcttcttttgaagttgcaagatggttcacgagttcactcctctccaatgtaatgtcattaagttatttcattaaatgaacagtgttcatgtttaaaatatacactgttcattttattttgtcaataactttttagtaatactattcatgtaaacaaacataacaacactatcaacaaaattcccagtaatgggtatttaaaaatatatctccacgaatccgtaaaaacactgatgaaaattcaaagccctgatacatttatttgacttcaataaaaatggtgtattattctatttttctcatttagcaaatctgttttaatagcgttgacaaatgtgtaaaatgaaacgctacattgaatgctgtgcaaaagtcacctcgaaaatcgttccaccggtcttgcctgatttaatacaaatactgccatcatgtactctaacgatttcacggacaagagcaagaccgaggcctacgccacccagctcccggcttctggatttatccacacgaaagaatggctcgaacactctctccctaagctcctttggtattccgcttcccgtatcttctacagacacataaacatgcttgtttctctgatatgcggttactgtaacctgtccaagcggatgattatatttgatggcattctcaaccagattgtatacaagcctgtaaataaggatatcactgcctatcatagtggcatcctcacatttaccaatcagctttatattcttttccacggcaagaggctcaaggtctgccaaaacctcttcaacaatagcatccaatataattttatcatcccttcccaccgtctgaagctcactcatgtcaagaagtgtctttaccatcctgtttaatttatcattttgttccgtaaccatttttatggtctgcaaagtgtctgcatcatttcccgggtgagaggcagaattatataaatcaagctgtacctgcattaacgctaatggagtacgcagctcatgtgctgcatttgcagtaaactgtctctgtatctcaaatgcatccgacagacgctcaagcatcttattataagaaatccccagctggttcagttccttaacattgttttcctctattcttgaatcagacagattctgagcctgtacctcttcaattttatctgaaaactccctgattggtctgagtgcatgcccgcttataaaataagtgacaacacctcccaaaagcgccagcaaaaccgtgattatcagactgtttcttttatagtcggccttattattgtacacctgaaccgaaaattcatccgcaaactcatcccacttatcgtccggtatgctgatatatatttcatctgatttgtttcctttttcatccccctgtgactctaccgcatcctgtaaagaatcgatgtaatgcacaccatttttatagacaaacatagtcaggcagccacatataatagcaatacacaatgtagtaatgcacgtaagtctccactgtagcgacattcttttcatctgtcagactcctcccgtattttatagccttcacctaccttgttcaaaatgggatcatatcccagcttcgccttaagcttttttctaagtgaagacatatgtaccctgattgctccgctaaagctgtctgccgtggcatcccacacatgctctatcagctcctcctggctaaccggtctgcctatattgataagtaaatattccaaaataccattctcttttcttgtcagtggaaccggctctccctttgcatatgcctcgcgtttaatcgtatcaaactttatttctccgcatttaagacatatatcattctgtacaaatttccttcttgtcaggcttctgatacgtgcctcaagctcctgcagatggaatggtttttccatgtaatcatttgctcctgcatccagtccctctaccttatcagcaatctgacctcttgcagataatatcaaaaccttagtttcatcattgtattttctaagctccttgagaagctccatgccatccatccccggcagattcaaatccaaaactatcagatcataattctccgacagtatacattcaagagcctctttcccatcataacaggtatccacctcataaccggcagcatacagactctttgcaaccatatcacatattggtttctcatcctcaacaattaataatctcaaaatgttctcctgcttcttaacaataattttacaacctatattgtataataccaaagtcagctggtcaacaatacaacaaaaaaggagcaacattatgttgaaataccaaaaaacatgtcaaatcattctgcttatccttggtgtatccatggtaagctatggtgcagtcagaggtgaggcggctaccgtgcttggtaaagcaataaaactatgtctggagtgtgtcggaattggataagaaaaagaaattactatcaaaaaagctggcaaaaatacgtggatggatacaggccgcagcaacgctgctgaccaatattcatattccgaatttatttaagggtaaaatatatcagggcaatgcaaaaacagtatgcgtacccggattaaactgctactcctgccctgccgcgacaggagcctgtccaataggggcatttcaggcagtcgtcggatcatccaaatttaaattttcatactacataaccggattttttattttactcggtgtaactctcggcagatttatatgtggttttttgtgcccatttggatggtttcaggatttacttcacaaaatacccggaaagaaattatccacagccaaattaaaacctcttaggtacctaaaatatgtcattcttattgttttcgttatacttcttccgatgcttgtaacgaactctataggaatgggagacccgttcttctgcaaatatatctgtcctcagggtgttttagagggtgctataccgttatctattggaaatgctgctatccgttctgcgctgggaaagcttttttctttcaagtgtatgattttaattgcagtgattgtactaagtattttattttacaggcccttctgtaaatggatttgtccgcttggagcaatctactcattatttaataaggtcagcctgctcaaaatcaccgttgatagcagcaaatgtgtcggatgcggtcaatgctcaaaggcatgtaagatggatgtggatgtgtgtaagacaccggatcaccccgagtgcatacgctgcggtgcctgcataaaggcctgtccgaaggacgccatctgctaccggtttattggaaaagcatgtcaaaaaaatgacaacagataactattaaacattttactattatttttaaaggagaaattactcatgaaaaacaaattatcatttatttctatttttacactctgcatagcattatcacttacagcatgcggcgtaaagcaagcttccacaacagattctaaaaacactcagactgaagccggctcagaagcatccggcaaatcagattccaggcttgatgatttatatcagcaggaaaatcagctttttgcagatcacgctgatgtgtggaacaaggcatttggcatgatgagcaaaagcgacgccgatccaaacggaaattatgctgattatcttgccggtaccgtagaatcaaacaaggattcattcacagacgatgagcttaaaacacttaatgaggatattgaaaccatacgaaaaatcgaggaacagatagcagagcttgaaaacaaaaatacatcatcagacgataacaagaaggacagctctaaagcctcatctgtattcagtaatttttccggtgaggattttgatggcaataaggttgatgacagcctgttttccggtaatgcagtaacagtcgtcaatttctggtttaccggctgcaaaccatgtgtcgctgaattatccaagcttaacgaattaaatgatgctatcaaatcaatgggcggagaagtggttggcatcaacaccgagaccttcgatggcaataaaacagctatcaaagaggctgcctctgttcttgaaagccagggtgtcaaatatcgtaatctgtcaattgactcctctagtgctgccggtaaatatgcctcagaaatcatggcatttccaacaactatacttgttgacagaaatggcaatattgtaggcgaaccaatgctcggcggaattgataacaaggacaactatgatgcccttatgaagcagattcagtctgtaattgatgcagacagcacaaataaataaatgtctacagagtttgtcaagtaaagtgtgtaagttttttaatttttttgtggtggtcgataaatcgaccaccatttttatggggttcaatcaaacggaagttcttcatctacttcatatggtgttgatttccgtttacttatttaaaatctccttagtaattctcgtattttaatattcgtgtttgcagcttgtcatccattgaaagctgattccttaccaatgcccaattagccacgagtctgcctttcatttgccgtttctataacctgatccgtgatattagaaatagttctcaattttatttgcgagtatttataatccatacaatgtcgcctgtcgatcagccacataaaattcataattacaacatcgttcaatcaattccctgtcatgggtgataataaaaatacttttacccatgtcacgaagttctttaaacagctgtgcagtacttaccatatgataataatccagaccgctcgtcggctcatcaaatatcagtatctccttttctgcaagcacagacgatgcaatagccacacgctgtttctgaccaccggataatgacatcggatgtttatcacgaaattcccatataccaagtttttgcataatttctttggctctttcctttatctcttttccggtatccgatgctccaagaagaacttcatcttctacagattcacagaaaagctgatgatttacatcctgcattacaagataacatttacggagcatttcctttggtttatactgcttctcttctatgaccgtctgtcccttaaattttttctccaatccgcaaaagcatctgacgaacgtagattttcctgctccgttttgtcctgtaattgctataagttcattctttgggagctgcatatctccaaactccagtacctttttttctccataggaaaaataataattcttcagtactatatccgactttttggcaatatactcatgtcttttactgctttcatcacaatgtggctgcattgtacgaagtccgagattttgcagcttttgctctgaaaatttcagaaattcctgcattgtgatatcaaacataattcttccatgttcaagatagactacacggtcacatatttccttaagccaatacaacctatgctccgctatcacgattgtttttccctgctttttccagagtaaaagcgtattttttagtctttctatggattctttatccagatttgatgtcggttcatcaagtacaaatacgtcgggctgcatcgcggttacagaaccacaggcaactctctgcttctcaccgcctgacaatttaaaaatatctctgtccataagattttccatttccagttcgcttacagccagttttacacgttcgttaatatcgttttctacaagtcccatattttcgcatccaaacgcaacttcacttgtcgtatccatgcaaaaaaactgacttcttggattctgaaatacactccccaccttttttgatatattatatagttcttcactctgcacattcattccataaacgctgacatttccgctatactctccttcataaaaatgtgggataagaccatttataaggcgcgttattgttgtctttccacaacctgatgccccacataacaaaacacattctcctttatcaactgaaatcgaaacatcttttaacgctcctttttctgaattattatactgaaaactgacattttctatctgtatcataatatcctccatttgtaacaaaaccgcactctgccaatatcatgacagcatgcggttttatctatatattacataaataatcttgaaatcattgaaacgctccatattacataaggaataaagcaaataagtactacaatatagtcctgaaaatgaaaaccaatccggcacacattggtccgctttacatcaccgccaagtccccgtgtaatagctgcggcattgagctcctctccaagttttgcggagcagaccataagtggaatcagtctgtactctatcattttatcgacatttttcccgccgaagcgaatatcccgcatacgcatcgcatcattgattgcccggaattcatccgcaatcgttggaaaaaaacgaaacataacagaaagtggtatggtcagcttatccgtaacatgcatcctgctcatagccgaagaaaactcacttactgttgttgtctgcatcagataggttccagccatgattcccggcagaaaccttgtcataatcccgcagaatgcaagcaatataaatccaataaaacctgtcatatgaggcagcacaaacactgtcagcaaataaaatacactgtacaaaatgatgtatcctgctgctcttttccacttacctacaagtataaaaagcacgaacggaagcagacagaataacggaaggtacgcaccaaataatttatctcctgctcctcccagaacaaatattgccattgtcattaaaagaagcattttcgttcttggatcaaatgtgacgtatgtatgtatcattatgcaattcccgctttctcaaaatgctttttcaacaatgattttccaaatactcctccgatccatccacaaatcacgcatgctgcaataagtaatgggatcagccatgagttcgcaaagatatctgtcattttagtgatatactcctgtccaaaactctgacgcgtactgaaatatgcctcaatattcataaacattggaacaaagtttccaaagatgatcagattaaatactccacaacttaatatatttttcttactgcttttataatttcccgattttacaataaggtctgtaataacaccacatataattccaaaaataaacggccagtatcccattcctgtaatccacaaaaacaatccaacgatcatagcataaatagttatcattccaaatttatcaacttttgtcaaaaaaagcatatatggaatacctccaaatattgggacaatcacacataaaagcggcatcatgatcggtataaatcccagcattgcaactgctgtcataatcacacagtaaatcgctgcatagattccaatattgatcaaatcttttccttttaatttctttttatttttcattttgaattctccttgttttttatcaatatattactttgtttcttaacgtgccagtttccagctgactgcctgctctcttgcatccacaaaccgcttgtaaattccttcctgcttcatcagctgctcatgggttcctttctgcacaatctgccctttctctacgaccacgatctgatctgcatggcgtaccgtcttcagtctgtgtgcgatcataatgatcgttttttctttcgtcagtgcatccacagcctccacaagttctttctcattctcaggatctacattcgcagttgcctcatcaagaataatgatcggtgcatccttcataatcgccctggcaatggagatccgttgtttttcaccaccggaaagcgtggcaccgccctctccgatcacggtattatatccatttggaagtttgctgataaactcgtgacagcaggctttctttgctgcttccaccacttcctcatgacttgcatcctgacgcccgaacttaatattattctcaattgtatctgcaaaaagatagacggactgaaagacaaatgcaaaattattcatcaggctgttcatgctgtactcttttacatttacaccgccaagggtcacttctccggaatccacatcccagaatctggcaatcagattacaaagtgtagatttacctccgccagacggaccaacgattgctgtcgttgttttttctgggatagagagtgatacaccatcaataatcttccgcttatcgtaggaaaatgtaacatctgaaagtctgatatcatagttttccggctgtatctctttgccgtcgatatccatcgtatccagttccagaattgcatttgctttgtccacacatacacttaccacatgtaagagggatgagtaatttcctgtacattccagactggcataaagcataaatgctgagattgtcataccaatggcataaaccgcactcatagttccattgatataaaaatatgcactgcatgccacaattacggctcctgttatcttcgttatcacgctttgcaaaaaatgatacgggacaaataccatttccatcctagtattgattttggcactcgcatcgtttgcatcatttaatctctttgcctgttttccaagcagattgtaggatttcacttctgagattccctgaagatactccatgatctgacttacgagttctgtatcacataccaccttttgttccgaatcttttttccctgcattctgcatcatagaatttacaccaaagaaaatcaggactccagctgcagatatcagtccgattctccaatcaaaaacaagcagcataaggatgatcatcaaagtctctaaaatcccctgcgttgtcagcataaccaccctggccgctatatctcctagtgattccatcgtattggttgtcaccgaagaaatttccccaatactgttggaattaaaatatcccatcggaaggtaacgcagatgctctgcaattttgattctcgtaaaagcacttgcattatagccaccttctgtctgaagtaccgtagaacttctcttacatataacagcaatcacaatcgcaatgaccataatggctaaggaacctccgatatattttcctatcggttttccaccaagcaaaccaatcaatatgtacataatggctggtatcttcattgcagatgcaagtgcttctacaagcccaatgaccatcgacagtttgaatttgtttccattttccctccctgaaaatcgaaagaatttcgccagaatctcaaacatatcattcgccctcctttacggtatcttttactgaaatatgggcattccacatttctttataaagcgggcatgacaccagaagctgctcatgcgtgccatgtgctgtcacgtttccatcatttaccacaaagatctggtcactgtcattaacggtagaaagcctgtgtgctatgacgatcagtgtctttccgtccaccagttttgcaatggatttttgtaatatagcttcgttttccggatcggtgtaggcagttgcctcatctaaaatgacgatcggtgcatcctttagcatcgcccgggcaatcgagatacgctgtctctctcctcccgacagatgtccaccggcaccgcctacaacggtatcaaatccattttctaactgcatgataaattcataacagccgctcttctttgtaacctcaaccacctgttcatccgtagcgtttggatttccctgtctgatattttcacgaactgtctcattaaacagataattgtcctgcgcgacataggcaattttccggttgaaatctgtaagtgccagctcttttacatcaaccccaccgattttaatgctgccggaatccacatcccataaagatgcgattagctttgcgatagttgactttccgcttccggaaggtccaacaattgcatttacagtccctgctttcagttccatatttactccatgcaggatttctttgtcgtgatagccaaaccttacattttcaagaatgatggaattatcttttggaacatctttacttttatccggacgttttaactccggctgttctaaaatacctgctatctcatcaacgatcactccgattttcccaaggtcatctgtataggagcccaccgtgatcagaggcccgacaattcccagtgagagaatgatacaaatgacaaaatcagataactctaaggttttattcgatacataataggctccaaaaggcaatactgtaagaagtgtatacggtgtcaccaccatcatcaatgcatgatagacagaacatcttctcatccatgaaatgaaagaatccgcatatttccttgccgcttttgtaaatttagcataagagctttctgtctttccaaatgcctttatgacctctattccgtcaatatattctaccgcagcatcattcagctcctttgtggtcttaaccgtcctttcaaaacttggcttataatccagcatcattccaaaatatgagaaaagtccaacaacaatcggaactaaagaccaaagtgccagccgatagtctgtcaggaagaaataaatcaggattacaaccggtgcaagcagattggaggtaaattctggtactatgtgagccagagttgtctcgatactgtcaattctttccaccatgatatttttaaaagtacctgacggtgtatctttcacatatccaagaggtaccctggcaagcttgtcgcaacacgcttttcttatatttgcaagtaccacaaaagttgctttatgtgacaatgacgttgaaagtgaatgaaacagttctgcgatcacaaacgacagtgcgatcaggactgcttttatcagatatttttcaaactccttttcaccgtttaaaaacagtttcaccacatccgcaattataaagtacggaagaatcttaaaaataacatttcctattgcgagcaatacactccacacataggcacttcttttttgtccagcccatgtcagtatccagctgactgctgactttttcttttctttcacacgtattcactccttgttatagttttaattttgttagttatccctaacccttgtataataaaataggtggcatgccggcatcagccacctgatattattttcttaaaatgtacctttctgaatcgtaagcctaaaatttaacgttccataatcgctcccagccaccggtattgaattcccgaagcttgtgcacatttctctttgcagtttccttatctatatcgtgctcaatgatctgaaatatagatgaaaaaaatccagtatagatcatatgcatgaggctttccccgacaatcggtatttcaattccatcctccttcattttcttcacatattccaaactggatctcatttccctgtctaccatattgtgtatgaatgtctcaaactttccactgtctccacatttcagcaataatcggaaattatcataatgctcatagatatagtcaatcatctgatccattccgtctagcggtacttcgtaccgttaaaaatggaatagccgttccgcagtagcggaactggcattccgtttgagcgtaatttgcatttcaaatgctttgtaacagctctttcagatatatcaaatagttttgcatttggatgtatattgttttctagtgcatatgactgaatgtaaatgtatatatctgttggtactgtaaactctctccgcttttgcgttttctgttctatgatgttgagtctgtatctatcaccatctcttattatgtctgatagccttaaatgtaatatgtcactgattctaagtccaagatttgcttcaagtgataaggctgtagcaactctgttatttggctttacaatatgaccatctgaacagataaaaccctgtcgaattgttgttataattagtttgtattgctcctctgtcaatgcgacagttttcttattcaatatatcaccgccttaaaagttcctattattgacaatatttagttcttatttccattgatttatttgatagcttccagtaaaccgcaccaataaaggaaagttccatttccgtaacagattaggtactaaattttttattgtcatttctgttgtactatcttatactatcaatgtaataaaaacactttcaatttctccacacttccaacaattttttcaaaataatttttatgaggtaaataatgaatatagaaatacacgagcgtaatcgcttcaatgaacttttacacaagatacataataatatagaagatactgcttttaaattgcttttaagcattccagaagatatgattccaagctcccttatgaattggactgaacattatattgataaacgtatgaatgagttacaatatcagcttattcgtgacaactggcgcagtgtagagcttgagaaagcagcagtacaacttaatagcaaaaattaaggtaaacacctttggatttccattggtgttttttattgaacatttgttttgtatatgatataattgtctatgtaattgaacagaaagcaggatgtgattttccgattgttagatgccctctagtattacaaaaggagggtgatgccctatgagtttagataatgtattaactcttctactcgtcatatttgcggctctgtcatacatagacaatcataataataaaaagaaatagcatccccaaccctcgcaaagtttaggatgctattcttattagtttttcttaactgagggtaaatcggagtcatatccgattcactttctaagtagattatacattagggtgcctgagaaatcaagtacccttttttaatataaaagaaacatgggttttcttggaaaagttagtgcattttcaaccatttttatacatatttttgcacattttagtgcaaactcaaccatttatggttctctctccatcttctctttgattgcttgacgtataaatcctgcttttgagcaatttttagctgtacagtagttgtctagtgtttcagcttcctcttttggcatggataacttgacttgtttgtaattgttctttatatatttgtcgtttgcttttctctgtgcgtctgaaagtgccaacatcctgtcctctctttcttatactaaggttagtatatcataaaataaaaaaattacaacttgatacataagctcaataatcttctggtaatactccacatgatcttatgctttgtattttcgcttgtctgatacatgaatatctctgttacacgctctctaaaatcttccggtaatattgaacctttaaacttgttacatgcttcacaagtacattgtaaattggttactgtattctttccaccattggcaagcggttttatatggtctaatgtcatatcatcatatgtgatttttcgtccacatagtacacatttaccttctgcattattatagataagctctctgacctctctgggaaatttaatttttccatttgtataacgcttgtaaacataacatgtttctaagtctttgatataatatccttttgttttgcctggtgcgtgttgaaatattatatttgctatatctatactatcaaaccactctgcttctagtatattacttgtctttccaacttttccagacctagattttgttatatatgtatttccattagtgataacgtacatactttttacctcattttccctctgctatccaatacagacagcagaggatttatattaatattccatctgacaaatcattaataagccttctggatgtttacgagttcccatgatatttgtgaattctttaatatgcttaatatcggcttctgttaggtctgtaagatttccctcttcatcagcttgaccgcatacaatcagattaccaactaacatagcatttcccatatcatctatggctgatattcgtggatcagctttaaatgtgccttcatcgtcacaaataatctcgtatctctttcccttgatactcctgtttactatatctattgttgtacagcctataagtctgtaatagtctttaagctcattcgcttctacaacctctgtattgttttccattacgttaattaaaagtgctttcatagttctattacctcctactgttcagtgtcttttttattcttgtcatttccttgtaaaacgatgattgtggcaattctatcaaggtgcagatttcagtattgttataaccttctgctttcatgcaaacaatttccttttgtgtttccgttagtttactcaatatgtcctgaactgctgcattttccataatatttgattctgccgatttcccacctaccatattatataaattctctgtatcgtcattatctgcatccagacttaataaagattcttcggtggctctcttctgcgctgtttccgttctaaaatggtttccaatttctgattgcatatatttccatgctattacagagaacttatatttctcttgcaggtctgctctcttgctatacacttgtatcgctttgagatagccgaacacaacaatattataataatcctctatactgtaccctttgctacttaggaagctgtatattaatctgtggttgtcctctgcaaacttgcgctcattatctgttagtcttgttaattccatttatcgtacctctctattcttctacactgtttctgataatcggggaacttttcagctccccttatgtaattgattaaccgatacacattaaaatgatgtctttgatttctgcgatataacgagaatacctaccatagctaatatgtaacatgttgctaatttctttaccgctgtagccttctataagtaacaaaacaattttcttgtactgctctttttcaagttcatcaattaaagcacttgtataaaggctatctattacaatgtcattgagtgatattcggtcatccttcaaaagattataaaaatcgcagtcatcagcttcagcttcattattattaatggcttccattccttctatgctccatataccgccttctggacatcttttatatctgtttaaatctctccaatagttgctccttgcattgtcaagtgtcctgaaaaacacctgttcaaatttaaggctctgcaatttctcatatctcaaatacttcttaacactattgagataagcaataatcaagcggtcataccattcctctatgtcaaggtcatgtattctcatgtaacgatacattaaattatggtgcgcttctgcaaatactctctcctctgctgttaatggactgtcggataatggtcttttaatcatagtaattacctctactttctttgtattttattgatttgttgttatggcatttcttccgatagcctagtcagctttgatgctacggctaaaccgactaggctttaaagcttctgcaagtttagaaattgtatattggatatacacaatcgagattaaatccctcttcaaaccaacagtgattgtttatctctggaatatcaacgataatatggtcatcgtgtacctctgtaacaatacccttctgcataattccatctattctgcacttgacattctgaccgactttgaataaatgttgtaatttgctcatgctcttactcccttctaaaatatgttgaaaaaattccaacttggatatatataaccgcttgtcatatggtgcatcattatatttatgtaacttgcaacgaaccacaccatgataattattgatactgtcaacagtacattgtatataaaatgtttcatgctctatctgtcctctgctttgtagtgggtggatttacggctccacccttgccgttgtcggttactacttcacacgtaaaacgttgtatgttgtaactttctcgtagtctgtcaagtctcctaaatcttcctcaagtcttttcttgtcgagtgtggttcttgtctgtggcttgtaagtaacttttgccgtgtctgtaatttcagtgtcaaggttgttttctttcatatagtctatgatttcaacctcaatcgctcttaattcgtctgcggtttcttgttgtagagccttaagactccttaactcattgattttgttctcaagttctttctttgtcatacacataaagcgtacctccttataaaaaatgctattgatttgttaaggtcatttccttgaccttgtaactgtattatacattggtactaatatattttcaattcgcataataactaaaatcatattagtaccaataggtatttttgtatattagtaccaatgcatttagcagcattatcagatctgcacaaaaaacagcatgcaatattggtactaatgtatattgcatatattggtactaatgtatataatatagttaacaaataaaacaaagcactttttaaggaggtttcatatgagtattaacgtatatgagttggtaacaaatcgaattattgagcagttggaaaataacataattccttgggaaaaaccttggagtggcacgattgacggagcattcaacagagtaagcaaaaagccttattcaatactcaatcagatgttactaaaatataatggtgaatatgcaacatttaagcaatggcaagagttaggcggtcatattcgcaaggctgaaaaatcagaaataattgtattttggaaaatgtacccaataaaagaaaaacaagatgatggaacagagattataaaaacaataccattactaaaatatataaatgtatttcacatttcacaagttgacggagtagagccactcaaacaaaaggtaacacacgacatagagccaatagaaaaggctgaaaagatattaaatgactattggaacagagaaaacataacaattgaacatgttaaaggtgataaggctttttatagtcctatgtttgacaaaatacagttaccattgtttgaacagttcaaacagtcagaagaatattacagtacagcttttcacgaatccgtgcatagcacaatgaagacaagcagatgcaacagacaagaggacagaaaaggaaaagtcgtttcgtttggttcggaagagtatagcaaagaagaacttgtcgcagaggttggaagtgctcaacttatgaacatagttggaatagaaacaacaaagagttttagaaactcaaccgcatatatacagagttggctaaaggttcttaggaatgacaacaagtttattgtatcggcaagcagtaaagcagaaaaagcagtaaattatatcttaggtaatcagtaataataaaagggtgtaggtaataaagcctacacccacacaaaggaaggaagtacaatattatgagtaaatcaataaagaacattgcaacagctacagttatagttattatgttaataggtgcgtattatcttggaactacacaagcaaagaccgaaacagttgaaactatcccacaaggctatatatcactagataagtgcataccgcttgatgatgtagcctattattatattaatagttatggttatccgtgttttgaattaaaggatacacgctatcaattaaataatagttctaatatgtcctatgatgatattttgaatgatttaccgcttgatactgaatatcaaaacgactgtatagatatgaaacaagtaacagactttacagcaacagagaacagcttacaattatatactgcggacggtaacggctactattgggaaaaataacaagatattataaggctatgggtgtaatgctcatagcttttttattatgtggtgggggtgggttttcattctgaaagtgtttttgatattgcaaatctgtactatctgtactattcgcatgaactttgaaaaattgtaaagtaggggtactataaactaatttctatgttttgattttccaggatctatatatctgattgctctatacaccgactaaaaaatataacctctccaatattttatcagcttatctcccactctaccggggggtatgtttgcattatgaaacctaagtacctggcatatggatggtgggatatataaaaccataggaatatgcagcagtgtatattttcgctagtaatggaagtgggatttacaacacttccattaaggtaataattcaaatttgtattgaaactaatattcgtcaacgtggaattggaaatcctaatcctataaagcttggtagatgtattaaggaacttgaaagaatttatggggttagagagggttctgctaaccaaaaaggaatcaatataaagtggcagaaccgaataattcggctctggcaaaatctcaatccgacctcgctacacaaatgggtatatcagtagatactcttcagaattataagatgcttgctgatatgataccaaaattagaagatcttgttatacagggattgtaacaacgcatactgttcttgcagatttcttcaacaacagtcagatatgcacacgcagcagtgtaccatttatccgtaattttcactgtagctacaataaactgcaagaagtaatcatttagctgataactttatcgtctaaaataatgaggtattcattttattgtagctataataaatagagggctacccttgccgttaaacaatggtagccctctattttatcatttatcaagttttttacatattgaatataataagctgataatttcaccgaaaccaagaaatagtaaccctgaaatgcctcctgttaaaaaatatataatgttagcttccgagattgccgaaacaaagcctatcagaattgtgattaaacctatcacataaaaaaccatagctaatacactttctttttcatcttgttgtttttgctgtgttggtatggtctgttgtatagtctgagtattttcttctactgactcattagtatcatctatatgctctctatagtaagttccagttttttgattatcttgtttagcagatttgattacaataactataaatattgcaagaagtgctaatgtacatacaatgattaataattctaaaattcccatataatctccttatttcacgttttttattgaagctattaaagctaatattgaaggtatcagcgtacacatttgcaataatataaataaagcaatatcaaacataaataatcctgccgtatcaaccatcagacaaattattgccaatactaacacaatgtatttcaatacctttgtttcttttatacttacaatcattccaagtattgtagtaataataaatcctataatagcaagaaacatcagccaccaaggtaatttatttgaaacacctattccgattccagaaaataaaatatatatcattgctataagattaagaataaatccacttttatttttcatgcccagcctccttataatccattggtatctgaatttacacaaccttgaccagaataatcaggtgccagataatccaattctatttttaagttattgcttgaagaatcgtaataagccataatatctatgactttatcatctaaattccatatagcctcatattgaatatttccaactaaaaaatcaacatcttcaccagataccccagctaaatctgttaattgtttcactccatttactgaaggatcgccatatttacttgttaataacgaaacaagactatcaaactcacttttgcaccaattagtatcaagaccaaaatcatagattaaataactgacttcataacatccataatcagaatctgtgtaatatcttagccaagtatcattgccatttaaagttgtgttatatactatagctccactaccatcatcatctaaggataatgtaagactctctttttctttaatctgctctactgtatcatgccaatttgcaacacctgctgcatttccaacaataggctcttgtgctttctgtgtgtcttgttctgtcggctgtgtttcagtttctttcttagtaacctcggttgttttctctgaatcagctttctttactgtttctgtattgggcttagcttgtgaatcgcacccaactaacatacaagttaccattaaataatagctttttcttcataggctctcctccccttctctaaaactatagttctataagtattactttatcatattttatattacttatcaatattttatcgtgtaaagtgatatattatcatcaaaaagaggtagagcatgaagccattaaagaacagagtgagtcttacacttgatgaggatataattgaaaaaataaaacagcttgcagagaatgatgataggtcattcagccaatatgtaaatatggtgcttaaggaatatttgagtaaaattgatagggctactgaaaagtagtcttattttgtatgaaaatagccttaaaaacactgacctgtatataacgacaattttttgtcattcatagtatagtgtgtagtagttctttataagatatatcatcaaaacaaaaatcagctcaatgttacgataagcaataacttcaaataatctctcaacaaattacttcaaaaatgaactattctatattaaatctaaatttaactttttacctctaaatttcaaaaaagccttgatttataagggttttaccgataaagattttataggcaaaaaacacctaaatcaactctatatcgttttaaggatgccgtaaaatcaacgttttcccaagcacacgatatagtgtacgatattgcaaaaaacgtaaaaaaagggtatatcagataaattaatatccaatataccctataaaattaaatacattaaactcaatcagctatctcgactttccaatttagcatagcattatacacacaatcctgtactttgcccttgcaactctctgcaagttctttaatatacttttccttaaatcttgagaagcctttgtatgcctcttctttcgtatcaaacgtaccaacatccattttcttacttaaaatatccatctgaaccttaaaaccatcttctttcttttcgatagttctttttacacctcttccctcgaatacagtattgagataatgtgtcataaatgcacatgtttctgggctgtaaacattattattcggtacaagcaagtccttatctaaatcaagtttttcatttagtattatatgctctctgtaccatatacggaagttagcaaagttgagccattcttcacatactgatttatccttgtaatatggcttatacacatgaattttcttattatagcaacgctgtatcatatttttccaacgattatattcgtcagagttataatcaacatcatctgtaccaagatacccaacaccttcatatgttcttctaaaatgccaaggattccaattatcaggcttatattctacagaatttatgatatccataatctgtgtttcagttaccgcaccattctcatcatatatctgctttaatgctccatactgtaattctgtgactggatataagtgtttatagtaattatcctttacatcattgttttcatgccatatacatgtattgtttagcatatcataatttacgataaatgtctggatcacaaggtcactagccttgactttctttctcctatgtccccactctttcttagtcttaaagtatacattcttatcaagagtgtaatataactcttcgtcatcgtgtgaacatgaacctctcaagagcttgtatctatcaccatcttttactatacttctaccatagttagatatccatgtatctttataatcaagcaatcgtacaaatctctcgtctttagcaatatgagctattcccgatactgcttttgtaagtattcttgatttatgtatagtcttataatttctttttgttctcatggatttatctgtattatataatgtcaacccattctcatagtatttctttgttcttgtgtcgataatacaatctttacatgttacagaccatgcctttccatatatttttgaatacttacttaatggaagttctctcccacacttcttacatatttttgtttcgttgtttttaatttcactaatcatagtcctccttattattaaatcagaggtcaagaaataggctcggcataaatgacgcaccttaataaactgctatatgtcacacacatgtgtgcgaaagattatcaaccagccattttttaggctcgttaaaatagctcaaaggaattgtcactttagccctgtaaactgctatatgcagcagtcgtgttattcaatttttcttattggaaaatgtgcagaattgcacaaatgataggttcaaatgaacctcacaagatattcttaaactctgatacagactttcttttacttcctgcctgttgggaaatatccatcatattttttaaatcggtgcatgtctgccgattatccgactgtaaactttatcactcttgcaagttgttttctattctcaagttgttttctattcttatgataatatacagtatttttatagctaaatctatctggatataattctgtagcaatcttcccaagtaagaccgatattgtatcaatatccttataatcttcaagagtaaccataataataactctataatacatttttataccatcaaggctagtgccttcctcttcattaacttcaacggatataaaattacaattgtctgacattgacatatcattagcaaaaataaagttatcttttatgtacttcattccatattcttttaaacaatgcttgtgatattcttcatcctgtaaataattttcaaaatactctaaaatctcagagttattggaaatattgtcaatcagttccttcttaatcttttcaatgcttaattcttttgtcataatcttagttctcctttactataatctcatactcaatgttacacgtatcatcttctgatacatccttattctgttgtaaatgtatatctaacatagttaccatgcagcctatatcatccttgcatttctctggcaactcaaaataagcatccttgatatgtaaaatattactcattctcttctattcctttactattcagttttctttttataatcttactaggcttcaagcgtattcttttttgagcaggtacttgacattcactattctttgcaatagtattagtaattttgtactcttttgactctgatgtatagaatgtcccaaagcaatcaattttaattttctcgccttgtcgtagctcctctataagaacttcctcaaatgctttccaaaacatatatgcttgatatttatacaatcccgcattttcagctaccttgtctaaaaattctttctttagcatcatttactcctttctggtgactcgataacagatataatttctgcacaattccccttattgttatggaatggtctgaaaaacacgtaataatcacactctatgtactcaccattcagctttgaattatggataaagtatgatttcccattgtcaccacggataaacccatatcctttgtccttaaaatatctcgttactgttccaaacatttaattcctccttgtaatttttctaatgaaatgcgtatttcttaatttgatcatataatgcctctgtgacgctgtaatcggctcatacaggcattttaagaccatcagtgtatatttttatgtttatcacttttaagacgctaaaataagaccacacaatctattacaattgatatggtcttattaagatgtcctaatcatatggattacgtcattcattattcagttgtattttcagctcatatttgacaccatttatgaaccaccaaaaacaccattttaaacccacggcatgaaaaattatgccaatttatgccaacttataccaagatttggtgtttttatgtaattttaatttttcctaagaagccccagaataccgctattttccaattatctcgcggttgtttatgaactcgtacggcacctcctggtacacataataattaagccaattggaataaagtatattgccgtgcgaccgccactgtaaaagcggcttttgtgtatcatcattatccggatagtagttcaccggcatatctatatcaagcccctttttcttatccctctcgtactcattgtgaagagtatatctgtcatactcaggatgtcccatcacaaaaatctttttaccgtcctgatccatcagaaggaatactccggcatcatccgactccgcaagtatggtaagctcctgatgctttaatatatcctcctttaagacctcggtatgccttgagtgtggtgcgtaaaacacgtcatcgaagcctctgacaagtgggacttttctgttctttacgtggtgcgcatacacaccaaacttcttctttggaagcacacgctttggtatgccgtagtgataatacaatcctgcctgtgcaccccagcacagatgaagtgtggagaaagcatgtgtcttgctccactccattatactgcatatctcatcccagtagtctacctcctcgtattccataagctcaaccggtgcccctgtgattatcatgccgtcaaagtacctgtcctttatatcgtcaaaggtctcgtaaaatttgttcagatgactgagtgatgtgtgagtggcctcgtgagtagatgtggtcacaaacgttacattaacctgtataggggtatttgacagcgagcgcagtatctgaagctctgtgtcctcctttaatggcatgagatttacaatcgcaatctccagctgtctgatgttctgatgtgatgccctgttttcgtccatcacaaatatattttctctctcaagtatttcctttacaggtaaatcattttgtgtctttataggcattttataacctcttttctaacgcccaaacatctctataaatgtatcctccgagatgataggtattcctaattcttttgcttttttattttttgatgtagtagattcagtgtcgttgtttaccagatagtctgtcttttttgacacgcttcctgtcaccttgccgccctgtgactccacataggccttaaactcgcttctgttggcaaaataatgcacatcgcctgtgatgacaaaggtcttgccgtttaagctcccctccgacatatcctttatatcgaccttttctatgtcaagctccttaatcagtgcttcaaacatcgcactgtttttgggatttgcataccattcaagtatagagcctgacttttcctggcctataccgtctatatccacaaaatctgtggcatttctcattctgtccgcgaagccatcaaaacctattgcgttgacaatcttcttgcctgcatcggtacctataagaggtatacatagtgcaaatatcagattgaccgggtggacatgtctgcttttttcgatggcagtctgcatattcgtgcatgatttttctccaaagccttccatgctgcttatcttatcaaaatgctctggcagatggtatatgtcagggaactgttttatgaatccctcatttataaattttagcattgtctgtaccgaaagtccatctatatccattccgcttttgctgacaaatcttgaaaactttttgacattcttggctgtacagtcagggtttgtacaatgcagcgtcttcacaccgctgtttttactcacaaatatgcgtgtcggatgatgacacaccggacattccttcggtatctcaactgctcccaccgcatcctttacagctatgcattttggaataatcttgttggcttttatcacggaaagtgtacattcttttcccactccaagcctttctatctcagtcagattgcaaagcgaagctctcgaaaccgtcgtgccctctatctgcaccggctcaaaaacagccaccggcgatattgtcgaaaccgcacacgaccactcaatatagcgaagcctcgtatctactgcctcatcctgccacttgaaagcaaagccggctctcgtagcatgatgtcccgtgatgcttccacctgcagcataggcagtgtcatcatagcatatgacaagtccgtccacaggcacatccatctttccgctctcaacatcccttgtccagcgttttacagcctcctcaaggcctgccgcatcagttgcctcccttttgacaacattgaatttcatatcactaagatagctcattctatcaccccatgatatgatatcatcatctatatgcacgagtgtaaacgcataaaacactacatgtctgcgcttcacttcttccacatcatcgagatttaatgtaccggaggcaaggtttcttggattggcatatttctcatcatcgtcctcgattgtatcatttaacagcttgaaatccgtgtaggaaattgtcgcttcccctcttacaaccatatgccccttgtatggtatctcctttgggaagccgcttatggcatcctgcaaaaaggtgatgttacttcctacagttccatttcctctcgtcagtattttcacaagcctgccaccgtcatatgtgagcacgagtgtcagaccgtcaagcttccatgaaagccatattggcatattgcctgcccatttcttaagctcctcgatgctctttgtctttgcaagtgaaagtgccggatactcatgtggctcacgatttccagcctctgcctcatagcctgcattctgtgtcggactgtcctgacggatatatcctgtctctttttcaagctgtgtaagctcatcaaacagtgcatcccactcgtaatttggcattatttcatctgcaccgttgtaataggcttttgatgcgcggttaagactttcaacaagctcatctatcttatcttttattttgttattctccatgctgtaataatcccctgtctgctttacttcgctcttctatccggatatttcttatctgtatgtttcttatccgtatgtttcttatcagaatgattcttattcatatcaggcataaccggctgatttgaggaatccgcaatcagtcttttgagtcccttgtattcaagtggtgtcacagccctgtactttcctcttggcaggtcaccgagctcaatattcatgattctcactctctcaagcttaaccacacggtagccaaagtattcacacatccgtcttatctgcctgttgtagccctgtgtcagaataatcttaaactgctttgaggacagctttttcacatggcactttctggttgtcacaccaagctctacaagcggtactcctcctgcgagccctcttatgaagctgtcagatattgttttgtttactgtgacaatatactctttttcgtgtctgttgccggagcgcatcatcttatttactatctcgccattgttggtcagaagtaaaagtccctctgaatccttatccagcctgccaatgggataaatgcgctttgggtaattaatataatctatcacgttgtttttttcccttttttctgctgtgcagactatgccggccggcttattgagggcaatcagtatcatctcttcttcctttgatactacctgtccattatatgtgacagtctgtccctttagaactctgtcacctgtctttgctgtcacgccgtctattcctactttgccggcttctatctgcctgtctgcctcacgccttgagcacacgcccgcttcactgaggaatttatttattcttacaccattttcttccataccatatcctctttttagattgctttatccgatatacataaaccacgctgtagccatttctactctttgcagcagccatttgctatgtagattaaaacacggagacctttaagcctccgtgttgcttcttattattgtatgcacatctgttactttgtattgcttttactgtcctactgtctggagattctctgtcttaatataagctctgccatttgttccggcgctgtaggatactatagtccagtcgccctctgtgccatatgctgtaagtgttacctgttcctttaagagaccaagctcctttgcatctgtgcttgcaccgtcacgtacctttacaacatcctttgtcactacctgatactcagccggtgcctgtggctgctcggctgtctgctgattggctgcatttgtatctgtggtctgttggtctgtggtctgtccggcatttgcatccgtagtctgctggtctgtagtctgtcctgcatttgcatctgtagtctgctgatcaccactctgtgatgcatcatctgcctgctgtgtatctgcctctgtagtctgtgtgtctgcatcagacttctttaaattggcaatgcctgacgatgtgtaccactgctttatagcacctgtgagtgttgtctcaagcatagtctttaaattggcatcagaaccgaccgcctgctcatatgccttttgtacctcctcatgaaggtctgcaaactcagatgaagcagtatacttagaaataagctccataatatcgtcatcgagttcattctcgcagtatgttctgttgaaattactgtatacattgtttataaagagctttccgtccttatctgtctctatataaaagaagtcaagtgtaggtgcctgtgtatcaactcccgtaaactttatactgtttttaacagacacaaagtatgttccctttttcaaaccattcttggtgtaaggtgtgatgtcattgactgactcatagtactggctgacaacaccaatatagctcttctcgttgtcgctcataggtgtcgcaagcttgccaagggtatcaaggtcatcacccacgtatgccttataataatcagcaagtaatgtgctgatatcgtcctttgcgtcatttgtgtaatccttttcaaactcaaaatccttcaccgaaatctctgtctgtgatccggcttcggtattggattgtctgccattattgcctcctgcgacaactactataagtatgagtatgagtcctacaagtacacctgctactccaacgtattttttattttctgcgcaaaactgctttatattatccaatgtttccttgttaaaaaagtccttcatgtgattcctccattaacccaacatatcaaaatcaaagtatgtgaccgacgcgaatcgaacgcgcactcgccggagtcggagtccggaattttatccattaaactacggtcacaaaaaagttaccaactatttatatcacatcttttactttttttcaatgttacttttttcttattataggcttttagtgttttattataactttttatgcatactattataattgataaaaatttgacaatatatttcatttatcttattatttaactgtttgggcattatatattggaaattttttccgatatgccataaaaatataccattttaattaataaaattactatttatataaggagcactattatgagtttcacatttttaaaccagcttccaactcctgcacagattaaggaggaatatcctctgtcaaaggagcttaccgagcttaaagcgaagcgcgatgcaatgatttcagatgttatctgcggaaaagatgatagatttctcgtcattatcggaccgtgttcagccgacaacgaggattcagtctgtgactatgtcagccgcctgacaaatattcaggaggatgtaaaggaccgcgtaatcatcatccctcgtgtatatacaaacaagccaagaacaaccggcgagggctacaagggaattgcctcacagcctgaccctgagaaggctcctgacatggttgagggtcttatcgccatgagaaaaatgcacatccgtgccatcgcagagagtggactcacctgtgcagatgagatgctttaccctgagaactggggctatgttgaggatcttctctcatatgtggcaatcggcgctcgttctgttgaggatcaacagcatcgtctcaccgtcagcggcttcgatgtggccagcggcatgaaaaaccctacaagcggtgatttttccgtcatgctcaattctgtttacgcagcacagcacccacatcattttgtttacagaggctatgaggttgagacatcaggaaatcctctgactcacgttgttttaagaggtgctgtcagcaagcatggcaacactacaacaaactaccattacgaggacttaatccgtctgcacgaaatgtacgacaagatggacgttgtcaaccaggcggctatcatcgataccaaccattccaactccggaaagaagttcaaggaacagattcgtatcgccaaggaagttatgcacaacagacagctttcctctgatatcaaatcacttgtcaagggtcttatgattgagagctatatcgaggagggcagccagaagattggtgagcatgtctacggaaaatccatcaccgatccatgtctaggatgggaggattcaaagaagcttatctacgacattgcagaaatgaattcctaaaccacaaattatacacacatttttttacaaaacacaagccacaggagtatatatcctgtggcttgcattattttgtcggtttattatttaatcatattactataagcaagaactgcactgactgttttggaatcctggattttcccggcataaatcatgtcgcacagctcctttagggtgtatatttctacatcgattgactcggcatcatcgagatgctgcttgccctttttcaggtttttggcaagatagacatctacttcttcgtcgcaaaaggctactgttgtgcgaagtgaaagtaaaaacgagatatcatcagagctgtagcccgtctcctccttaagctccctttctgcacacagtctggtatcttctcccacaaagtctctgcagccggccggaatctctattgtctccctctcgagagcatttctatactgacgcaccatgattatcctgccgtcatcaagcaccggaagcactgccgcagcgcccttcctgtgtgaaacaaaatcccattcctcagtcttaccgtttgcaaactgcattgtatccttgtatatatcgagtattgagcccttatatacaagctctcttttttgccgtttcatttcatcaatcatttttcctgtttaccttctaaataatttaaattcagagttaccgttttgattagaaatccacctctgtgtcataatagcagcatttgagaagcttctccatctcctcctggcttggctgacgaggatttgagcctgtacaagcatcaaggatagcatttgcagcaatctcaggaagtctctcaaggaatacctcctccggtacaaagccctgctctgttggatagctgtctgctccgtaattcttgatgcagtgtggtatattcagatcatcattcatgccacgtaagtatttgataagaagctcaaccttctcatcaagtgtctctccacccagtttcatgaaatctgctattacgccatagcgttcctttgctgtctcatcctttgcattaaaagcaataacctttggcagatacatggcattggctgctccgtggatgatatgtgcaccataatctgcaaaagctgcgcctgtcttgtgtgccatggaatgaactattccaagtagtgcgttggaaaatgccattcctgccagacactgcgcattgtgcatcgcatctctctttgccatatcaccattgtatgaatcaatcaggtcatgctgtatcatctctattgcatggagtgcaagcggatctgtaaagtcactgttggctgttgatacatatgcctcgatggcatgtgtcatggcatccattcctgtgtgtgcaacaagcttctgtggcattgtctctgcaagctcagggtctacgattgcaacatcaggtgttatctcaaagtctgcgattggatacttgatacccttctcataatctgtgatgattgagaacgcagtaacctctgttgctgtgccagatgtagatgaaatagcacagaaatgtgccttctttctaagcttaggaataccaaataccttgcacatatcctcaaatgtgatatccggatactcatacttaatccacatagcctttgctgcatctataggtgagccaccaccaattgctacaatccagtccggttcaaactcagccatggcagccgcacctttcatgactgtctcaactgacggatccggctcaattccctcaaaaagctttacttccatacctgcttccttcaaataagcctcggctttgtctaaaaagccaaatctcttcattgagcctccgcccacacagataatagccttctttccctcaaagctctttaatgcctcaagcgcaccctttccgtgatataaatctcttggtaatgtaaatctctgcattgtaaaaccctccatacgatattttaattatatagtttctcccttgtaatatttataaatattgcaaccatcaaatactgaatagttactaaatattacatttattattttataacgttttactaattttgtcacgtaccattatctatttttgtgaatacaagatattttatacacacatttttatgcaatatatacaattatcttctgtaataatgaacagttaccgataatttatttcataccaataagcactacattgtaaaaatcggctgcatttacgtttttattttttgcaaaaaagaaaaggcttcatacgaagccttttcaaatgtacatgttattatgtcaaaccgacaatacgctaatgctctactttgcgtaatccactatacgtgactcacgtattacattaacctttatctgacccggatactctaactcagactcaatctgcttagatatatctctggccatgataaccatgtcggcatcactgacctgctcaggaactaccataatacgaatctctctacctgcctgaatagcaaaagatttctctacccctttataaccatttgtaatgtcctctaactgctgaagacgatttgaatatgtctccaaagtctctcttcttgcacccggacgtgccgcactgattgtatcagctgcctgtacgagacatgcaataagtgactccggttcaacatcaccgtgatgtgattctactgcattaatcacaagtggtgactctttgtatttcttacataattcggcaccgagctggatgtgtgaaccctccatctcgtgatctactgccttacctatatcatgtaataagcctgcacgctttgccattctgacatcctcaccaatttcagcagccagtaaacctgccagctgtgcaacctcgatagaatgctttaacgcattctgaccgtagcttgttctaaacttcatctttccaagaagacgcacaagctccgggtgaataccatgtatgcccacctcaagtgtggcagcttcaccctcttcacgaatcatattatcgacttctttttgagccttctcaaccatctcctctatacgggccggatggattcttccgtcaacaataagcttctcaagagctattcttgcaacctctcttctaattggatcaaagcttgacaaaataactgcctcaggtgtgtcatctataatcagatctacacctgtcatagtctcgagagtacggatattacgtccctctcttcctatgatacgtcccttcatctcatcattcggaagcgatactactgaaatagtagtctcagacacatggtctgctgcacatttctgaatagctgtaaccacgtaatccttagccttacggtttgcctcttcctttgctttgttttccatttccttaatcatttttgcagtatcaagttttacatcttcttcaatggtctttaagagatattctttagcttgctcggaggttaatccagagattctttcaagttcctgtaaacgctgctcgttaagctttgatatttcaatcttctgcttcttgagttcctcttccttaactacaaatccggcttcacgcttctcgatagcttcgagcttcttgtcgacattttcttccttctgaacgatacgacgctcattacgggaaatctcgtttctacgctctttgatttccttatccagatcattcttagccttaatagactcttccttgatctcaagcatagactcgcgcttcttttcctccgcagtctttacagcctcatcaatgattcctcttgccttctcctcagcatttcctatcttggagttagcagatttcttctggtataaagcggctgcaaaccatacaatcaatgcagtaataataatagaaactacagcagtaatgatatacggtagcattacaggagcacctcctttattaaattttcattgtatttcacaaattacaacaattaaattctatactttttggtgcaaattgtcaaggtaattgtgatctcattgctgaaagaatctggctgctcttaaagcccctgcgcataagaaactggtatatcctgcgaaactccttttcatcacagttatcaggatcatagtgtttcttttcaagcagctttgctatatgtttctcttcatcagcagtgtattcgctgtctatggcacaatttatatcatctctgcctatgccctttgtcataagcttctgctccagctgcctgcggcttaagctgtcctgatgatacctgacatatgtggaagcaaatctgtaatcatcaagataatgaaagctcttgacataatctattgctgcatccacacagcaatccggatatccgccctgtgtgagcttttccctaagctttctttcactcctgtccatctgttcaagcagatgcagtgctctctttttggctctctttcctaccacctcagttatcagcttttcgtaatccgcttcactgataaaggctccctccataatagagtaccgcacggcctctgtacgatacaacacacatgtcgtgccattatcaaaggtcgtgcggtatttgcctttaccaatattctcatatccggtaatctctatcatatataaccctgctcacttattgctcatctgcctctgacttttcagagtcttcctgtactgcagcatcttcgtcctcaggctgtgtgaagtaaaaatcccttacctttgcctcaagcatatcaaaaaatgccggattctcatggatataagtctttgcattctcacgaccctgtcctatcttgtctccctcgtatgcataccatgcaccggatttgttgacaatgcctgcatttactgcaagatcaagcacatctccttctcttgagataccctggccaaacatgatatcaaactctgcctccctgaaaggaggagctattttattcttaacaacctttacgcggacatggttgccgactatctcaccggcctgcttgagtgactcagttcttctgacatcaagacgcactgatgaatagaactttaatgcccttccacctgtggtagtctcaggatttccaaacatcactcctaccttctctcgaagctgattgatgaatataacgatacaatttgacttgctgataaccgccgtgagcttacggagtgcctggctcataagtctggcctgaagtccgacatgggaatcacccatatctccgtcaatctcagcctttggtacgagtgccgcaacagaatcgacaaccacgatatccacagcgccggaacgtaccattgtctctgttatctcaagtgcctgctcaccgcagtccggctgtgaaatatagagattgtcaatatcaacacctatatttctggcatatacagggtcaagcgcatgctctgcatctataaagcctgctatgccgcctcgcttctgtacctctgcaacacagtggagtgcaaccgttgtcttacctgatgactccggtccgtacacctcaataatcctgccctttgggaggcctccgagtcctaatgcaatatcaaggcttaatgagcctgtaggtactgtctctacattcatattggctgaattgtcaccaagcttcatgacagagccctttccgtattgtttctcaatctgcgcgatggcagcgtctaatgcttttaatttatcttcctttgccataataatctcctatcctcttacgaacaaacgttcgttctgttattataataatacacttctattcaattgtcaacaaataaattggaataattacagaatcaaatagctgcccgtgctgctgtttgtgcctcacgctatactctaaaacagctatagctaaaatattcaaaaatatgcaaataaaacataattaaaaagacagttgctttcacaactgtcttcattatacacataatctctcactaacgtcaagtccaaattcaaccttgaaatccttacctagtttcttccaaactcagtaagcacaagtccgtcatttctatcgagtgtcatgccgatgctccactcattgatgaacagaagaagcggatttcccttcatgtcgacaaccttcttcatatcacttgttccgttaattgtatctacattgacctcatccttgttctcaatccatctgatatgctcatatggcagattctcaagtctgatctgcacattgtactcattttcaagtctgaatttaagcacgtcaaactgaagcacaccgaccacgccgactatgatttcttccatgccgcccttgtactcctggaacatctggatagcaccctcctgcgctatctgtgtaacgccctttacaaactgctttctcttcatggaatcaacaagtgataccctcgcaaaatgctcaggtgcaaatgtcgggatgccctcaaactcaaatttatcctttgctgtcgtgagtgtatctcctatagagtatacgcccgggtcaaacacacctatgatgtcgcccgcatatgccttgtccactatttttctctcatctgccatcatctgctgcggctgtgaaagctttaggctcttgcctccctgcacatggtatacctccatgccggctgtaaactgtccggagcagattcgcataaatgctattctgtccctgtggtttttattcatgttggcctgaattttaaatacaaatgcagaaaaatcctctgaaaaaggatcgatcattccgatgtcagattgtcttgctgtcggtgcatatgtcatcttaaggaaatgctgtaaaaatgtctcaacaccaaagtttgtaagagcagagccgaaaaatacaggtgaaagctctccctttgtgacaagctccatatcaaaatcggcactggcaccatccaacagctcaatctcatccatgagctgacttttaaattcctctccgatctcatcggaaagagccggatcatctatatgaataatcttctccgagccctcttttgtaccctttaaggtatctgcaaaggtcatgacctccttgctgtttctgtcatacacacccttaaactgctttcctgagcctatcggccagttgataggacatgtcgcgatgcccagctctttttcgatgtcatcaagaagctcaaacgtatcgttggcatcacggtccatcttgtttatgaatgtaaaaatcgggatatgtctcatgacacagaccttaaagagctttctggtctgtgcctcaacacccttgctcgcatcaattaccatgacggccgaatcggctgccatgagtgtacggtatgtgtcctctgagaaatcctggtgtcccggtgtatcaaggatattgatgcaatatccgtcataattaaactgtaatacagatgaagtaaccgaaatacctctctgcttttctatttccatccagtctgaaacagcatgctttgccgtagcctttccctttaccgaaccggcctggtttattgcccctccgtacaaaagaaacttctctgtcagagtagtctttcctgcatccggatgggaaattattgcaaatgttcttcttttttctatttcctgtcttaagttatccactgatatttcctccaaacaaaatcagagtatagtatagcttaaaacggtttccatttcaagacactaaaaatttatgtatcagtccatcgtcgatatgacaatatttgatgccccgatatttgtcttgcgcttgattatatcctctatctgagctctcttttcatcagtcacatcttcctttcccacaatcacatcacagcattcatcactgaggcttaccacagcattcttaaagccctttgcctccagcatcatctgggcgtcctcctccatctgtgcattttctgtcagcttcaccatggcatcgaccgcgctcttcttctcggcctctgacactcctgcatcatcgataatcttctgcagggcctccttgttctttgagcgcacctgttcgcgccccagcttaacctgtgccacacactcctcgctctctgtggatgcacttgtcagtaccgtttcgccggcatttaatatttcctctgtcgagtctgtctcaagcgcaacctcatctgatgcctgtgtatcctcacattccttagactcctttgtatctgcctttccatttacagcttcgatttcagtggaaagcacatcctttgcattcataaaggtatccctgttatcgtagcttatgtaaccgaccactgccaaaagaagtgcaagtgttgtaataattatctgatttttatggctgcctttcttcacttttattcctccctggatatcatttttgctatttttattttatgcatgggcacatcaaataatgcagaaaccgcattagaaatatcgttgtttacctgtgggtttcctccgccctgcgctaccacaagcactcctgaaacagtcggtttgtccgtgcttgtgacataaggtacgcttgcatcctcgtcatcgtatatgaccgtagtcttttcaatgctctccgaggactccttagtatccttatccactatccttgtgccatcgtctgacaacgtaatcatcacagatacctcacccacaccgtccatcctttcaagaataccctcaagctttttttcaagcagcttctcatattcttcatcatcgcaggtgctttcacttactgacttagctttagctttcttttgtgaattactacaggtatttttatcctcttttaccggaagcaccacaataagaagcagtactccaacaagtaaaatcactatgtagtcagttttcttcagcttcgaaagccgtaaacaaatctgtcgtatccgcgtcatattcatacgaaatcccctctattttctttgtaagctcagcaaatctcatgtcatattcataccctgccgcaagaggttttagaataatgaccgccaaaaacaccccaagcataaacctaaagtacctcctgtactgctcctttggcgttaaatatgtcattaccatgaaaaaaaatgccagatacaaataactcttcatgccctatcaacctcccataaagcttgtagatgcacatactatcgcaatcactataaaaaacaatatagatgcatctcttatcacgatataatacagatttcctgccctggcaacggcttctatgccctccacaatcctgttgtctgaaaccggctgcagcgcagcggaaagcaatctgtacatcagcgaaaagattagagtttttacaagcggggtcagcacaatgaaaaaaagcacgataatcgccgccataccgacactgttttttatgagcatcgcacagccaagcataatttcacctgcaccctgcccaagcctccccacacccggtatcgcctgaaaactttttaagataagactttccgatattttgtcctttgcgggagcaatcatggcctggactatgcctatgcctgccactatctttatggatgccttcattatttttgtaactgctgattcaataaactctgcaagcttttcaagcttcttttcactagatacgtgattgagcacctcaagcaccagaaacagatgaattcccggtatgagcaccagctttataagccactccactacataaatgagcacaaatgccagcatgtaaaagcctgatgccgaaaatccttttccggacgcaagaagtactgtcgcatatgccggcacaagcgctgtaagataagtcaaaagcacatcaatacagcccttagccacatcagacaacacaaaaaaagatgccataagcattgatataaccgatgcatacataaacagaaagcttacattgtatacataatcctgccgccagaaaataagccttgaaaacaccataaaaagtatcgtatagcacagcacatttataataacaggcctcaccgccgctatctcataaaaaaacagctcataaatatactcacagattttttcacctgccttttgatctcctgccagaatggcatccactatatcagaaaacgatagtctgtccggcagataatcctttgaatatttttcaatctctgacatatctattttttcaagcatctgctgctcaattttatctgtaatttcggtgtccgacgcatacacaaaacactgcggcaaaaacactacagccaatatgattattatcaaaatatattttttacaaatcaaaacagctctccaatcagctctatcagacaagacatcaccggaattgacatcacaacaattgctcccttcgcaaaaagctctatctgcgatgcaattgcgctatgaccgcagtccttacagattgaggatgaaaactccgcaatatatgcaatcccaagcatctttaccatagtgacaaaaaattccggttccacaggaagctttgaaagaagtcctttaaaaaactcaattgttgtgccgagccgctccaatgcaaaagcaaaaattatagtgccgcaggccactgaaagaagcattgaaagctcaggcctgtcacgctttaaaagcactgcaaaaaatactgccgcaattcctattatcccaatcttcaacatattacaaagaaaacatatcctgcattgccttaaacagctcacttatatatggcacaatccagaacaatacaataacaagcccggccagactaagcaggaaagtcatttcctcccttccactgtgttttaagacctgtccgagcaccgtaatcactattccaagtgctgctatcttaaaaataatcgaaatctccatcatcaagtcctttcatcgcatacaacaatatgtttaatcggattaccacatttttatacaaacatttttatataagcattattgatatcataatccctcccaaaatacccacaggacaaatcaccttcattttttcaacataatctttcctgtaaaaatctatctgtttatgtatgtccaaagcacattccttaagccgctgctccatcgcagctgcatttttttcaaagaacgcacctcccatttcaactatcattttctttattttttcatcagataccctgccacaaagcaccttctcccacacagccttccagccctcctccccgcttttacagctcctgtttgaaagcacttctcccattctcctgcacccctcattaaacacctcgctctttcctcttatgctgttaaaaaactgtggtgccttcattctttctcctgccagataaaatgcccccttttcaagcaaaagcataaaatcatacagcatcgctatatctgccttttttcttttgctgtaatcgtttatcagccccgataccgcaaacagtactatacaaaagcctgtaagcttcatcataaatgctataacgcctcacccctttttcatcatggtctataaacacaaaccgttctatggcatgtggcagcatttttcttcgcagatcatctgcattggtgccatgtacactgccaagtatccttattccgcaactcacaagctggtttagtgcctcgatatcgctttcacctcccagctcatccactgcaatcacatccggtgacatagagcgcaaaagcatcctcatgccaagtgacttcggacagttatccagcacatcactggaattgcctatatcgttttgagccactcccaagtagcacgctgctatctccgaacgctcgtcgaccaccgacaccttaagagcgttttttccgtcacagccatctgaaagtatccttatgcagtctcttaaaaatgttgtttttccttctcccggccgtgatataaccaatgtattgtaaatgctgttttcatcccggatataaggcatcagtggcattgcaacgtcccttatctgatgggcaattctgatatttaaggacgctatctcactgactgctgtaacctttcctccatcgcagcccatctgccctgcaattcccacacgatgacctccctccactgtaaaatagcctgctgcaagctgcggtgctatcgcgtggaatgaatatccgctcagataatttatcatctcctcaatatcgctatgtgagatatacactccggctctacatcctcccgcaaacatatactgcacctgctttccggcgcgcaccctgatttcctccagaccacacggcatgtacgcttctgcctcagccttcatcttttgtggcagataatcaattatatccatatttttcactccttatcgccaccgacagttattcaaatcaaaaaaggacacagacgattctgataaatcatctatgtcctatttatattacatgtccaattgttttagaacgtgaaaattattatttttacatcctgtcaggagctgagaatccaagcatatctatacaagcctcaagtatctcctttgtgagcacaagcaacgaaatatatgacttcttaagctcttcattctcctcagaaagaatctttgtgtcatggtagaagccgttgaatgcgttggcaagctcgtagatgtatgcacatatcttgtgtggtgcagactcctcatatgcactctcaattgtagcattgaactttgccagagagagcatgagactcttctgtcctgcattgactgccggcatgattgcatccttcagtgcgctgatgtcgccaccctttgcctcatactttgagaggattgacttgatacgcacgattgtataaaggatatatggacctgtgttaccctcaaaggatgtgaatctgtcgatatcaaagatgtaatccttgctcgcctgattagacaaatcaccatacttgactgctgcaagcgctacagttttggctgtctgctcagcctccgcctcgtcaatatttaaattctctttttccttttggttttccttaatcttattgagcatctcatcgtcaatttccttgaggaggtactcaagacgcattactccaccgtctcttgtcttgaaaggcttgccgtccttcccgttcatggttccaaagccgatatgtacaagctctgtagtatcaggtactatgcctgtctttcttgcgcagcggaacacctggataaagtgcattgactgacgtgcgtctgccagataaatcacacggtcagggttgttctccttcatacgcataacaagtgttgcaaggtctgtagtgctgtaaagtgaggctccgtcagactttaggatgatacatggcggaatctcctttgtatccgtatcctccttcacatccacaaccaaagcgccctcactcatatgtgcaaagcccttttccttcatcatttcaaccatcccaggtacatatggctgtgcatccgactcgcccttccacagctcaaaatgaacattcagattctcataatttctcttaagatctgttacagatacattcatgatgtgtgaaagcagcgcctgatagcctctccttcctccctgaagctctttggtagcaagaagagctgcctccttgaagctctcatctgattttgacttaccgctggctgtcggatagatgtcctcaagctctgatatggtaaacggtgcctccttcgggtactctcctgtatagctctcatcaaaataaacgaggtcaggctttctctcgcgaagctctgtgatgataagtcccatctgaagtccccagtcaccgagatgcacatcaccaatcacattgtgtcccatgaactttgcgatacgcttaacgctctctccgattactgccgaacgaaggtgtcctacatgaagaggctttgcgacgtttggtccgccgtaatccactactatagttagtggcttttttgccttctccaagccgtatctgccctcgtcatccttcatatcgttcatatattttgccagaaaagcggtatccattttgatattaagaaatcccggctttactgattctactgactcaaacatctcatctgactcaaggagcgccgctaccttgtccgagatcataaatggtgcacacttatactcttttgccgctgccattgctccgttacactggaactcacaaaggtccggtctgtttgaaagtgtaacctttccgtacttctcgtcatatcctgcactgacgaatgcctttgtcacttcctctgatatcaaattaatcagttttttcattgtattcctcctgatatatagctgttttgcgtcaaacagcgaatatacttatattagcacacaaatgaattgctttcaatatcaaccgtcatttttgccttctgagtaaatattaaccggcaacgtaaccttgcatttgcacccccaaaggagtatgatttcatatgaaaatttaaaggaggtcttatcaatgaagataaaaaccaaacaaataaccgttactgcaattatgcttgcaatctgtcttgtcagccagttctttaagaacttaagcatatacatcacaggtccaatcattaatgccgctttaatacttaccgtgctctatgccggaatggcatgtggcattatcctaagcattatcacacctgtcacatcatttttcatcacaggaagtcctgttatggcggctattcctgcgatgtttccatgtatcatgataggaaatatcattctcgtggtatgtgtgggactgcttcgcaaaaaatgcggcaaagctgccggttttcccgtatcaattgcaataggtgccatactaaaggccgttttcatgggaatagccattgctcttatcattctaccgacatttctgcctgctccgatgcacaagatgctgccggttttacagcttcagttttcagtgacacagcttatcaccgctgttatcggaggtgtgtatgcagtcataattgcggctgtgcttaaaaaaacttctttagcacaggcagactaaatattcaattatctgcttatgcttccagatatccgtgcatatttttaagcgcatttttctcaagccttgatacctgtgcctgagagatatttatctcctctgccacctctatctgtgtcttgccttcgaaaaaacgcagcttaattatctgtctcgctctgtcatcaagcagctttaaggcatcgtcgagaaccagattttttacccatgcttcctctttgtttttcttgtccgatatctgatccatcacataaagtgtatcaccaccgtcagtatatacaggatcaaagagggaaagcggtgtctggattgcatcaagtgcgtatagtatatcgttttcagggatgccgcaatcctttgatatttctgccagggacggttcgtgcaccagctttcttgatagcttttcctttgaattaatagcctgataagctgtatccctgagagaacgtggaatgcggtacgcactgttgtcacgcagataccgtctcacctcaccgataatcatcggaacagcataggtggaaaacttaacacctatagtcggatcaaaattatcaattgatttcataagtccgatgcatcctatctgaaataaatcatccatattttcattatggtttgaaaaccttctgattaccgaaagcacgagccttaaatttccacgaatatacttttctcttgcagccttatcacccttttttattttctcaaacagttcttctttttcttcatccttaagtatcggcagtttcgatgtggtcactccacatatatcaaccttatatacagacatgggaatcctccggataaatttctttatctaaagcattcccatttacagtaattttattcaattaatcctcgtatataattctacagcactgccgctatttttatattcttttcatccttaagcaccagcacactgttgtcttcaagcaatgtaactgtaggccttgaatacttctccgtcacaaaaattattttggactttttgccgtttgtcaaaagcacagtgcttccgatgttagctttatgtacttcttgacattcaaagcattttttgttaacatagcaaggcgaaaataaatgcgtcagttcgaaaccttcctgacgtaaaacaaaactaaaggagaactaaatatgagaaacaaaaaagtattatttgcagtacaggcagctatgattgcagcactctatgttgtgctcacgtatatcaccaatctgcttggtctcgcatcaggcaccattcaggtacgcttttctgaagcgctttgcatccttccggttttcacaccggcagccattcctgggctttttatcggatgtctgatttccaaccttatcacaggtggcatcatctgggatatcatcttcggaagcatcgctacactgctcggcgcactcggcacttacttcctcagaaaaaagaagtttgtatacacgcttccacctgtcatcgccaacattattatcgttccactcgtgctcagatacggatatggttttacaactatatacaagggtgttgatatctctcttcttttcaatgcagttacagtcggaatcggtgagattatctcaatctgtgtacttggaagcctgttaaagggaatactttcaaaatacagaaatgtaattttcaagcaggacgaggcgtagttacatacatagcacttttaataagctgcgcgtcataaaataaaaaaggggctgtaaaataagtccctaatataagaaacgccaattccggcaaatgtcggttttggcgtttctttgtattaacttttctatttctaagcaagtctgcatctttgggtataaaaaatggtgcatttaataaagctcggctaatcatgcccgcttaagttttatgcaactttcgtctgtcgttgctttttattatgatatttataaagattgaatccacatgaaatcagtgtgagctcgagaattacatttttctcgcctctccggaataatcttttatacgatttgtcccactttaatacaccaaaagttccctccgattgaatacttcggttcattctcaagagagcaccatgtatggattcaagattttgcagcacttcctgatggatagaagttaattcctgattcatcacagatggctgcctgtaggttgtatgccggaagtagctgatcgtttcccatgtaatcacgctttaaacgcatgaaagttgcatcatgatctgttttggaataactgtttctttcttctccacaggtctcgatgtgatatgcataggatttcaaacgttccagatattcatgcaattcttcgtattgtttttgtcgaatgctttttctacgaccacgtccggaaacgaaagaagtttcatccagtccggttgtttctttgtacatcgtaagtaattcagagacataatcaaccgcatacgcttcacgcttttcaaattttattccgagatatccaagtacttcctgattcatagcatcaatcaagagtgaaatcttgtcaaagactttctgccggtttttcacacacgatttttttcatacccaggtatatcgattggcatttgcctcaatttttgtcccgtcaatgtatgtatgctgcagatccacgtgatctttggcaaaaatatatgaattaatgtcttcaaatatctgctcgatagaatcggttagttcgtttcggattaagtttccaaatgtagcaaaagaaggagttttcatgccatcaagaagatacatgtaacgaatgtcattacggcagagcttttctatttctcgtaaggagcagatgccattttccataaaggcaaaaagtattactttaaggagtttttgagcatcacatcttgggtgacctgttttatagcctttctctacaaaatatctggataggtcaatgtgatccataacctcacaaaaagtgtataccggatcggaaatatcgatcaatttttcgatttctaatggtaatttcagctgacgcatagtataattaccattggtattattatttagtagcataattaattataccaaaaaatcgctcagacctcacggtctgggcgattttctgtcaggggagtttttttattttttaccagacctaatgcagctgtcagttaatttttgtaagttattcctccctaaatttccatagcatctaccattatacttatttctctcttgcctgtatcctgatttgcatttgccacaaactcataaaccggacgataatatcccttcgaatccggtgtgtaacttatcttcactgattttacaactaaatcagataattgttcatctttatcataatccgggaaataaaattttcctgcacatagcctgtcataagcctctttttctgaaataacatctacctttttataaggcgtatattttatcatggagtctctgaaatttgcaattttacctgacgaattaatacaacattctatcgttcccttataatacaagccatcgtcaagaatttctccatcgtttgtaaacctatagtttcctgcatcatattcctcgattggtgcaaaaactgcgttttcgggaataaccactcctagattttccagcttttctctgacaaattcctctgaaagtccagcgtcagcatacgaattttcatcatctaaatttgaaaaatccgtgaaacttactgttggtccttcgtaatcgcaccagatactcaggttactgccctcatcatcaaggctggtactgtaaaaaataatagtatcatcatatatgtctgtttttgagtcatctattaaaacaccatactttgaaaagtacccgtcggcaagctccctcgcctcatcttctgtagccctgtgaattgtgtatacatcaagcggatctgcctcatctgccagactcacaccatctgccatcgagacatccacattttgatttgaaatattatcgattgaaagattaccatattccatactattgtatacaataaaaacagctgcaaaagctataattgtaaacgcaagcggaagctgtgccaccagacattttcttatggaaatgttctgtctttcacaaacattttcatcatgtgccactccactgacttcatttgtattatcttggactttcttccttgaacagactgccacaaatatcagtcttgcaaccgaaaataatccatatccgatcattgcacctatcgtattatttatgatatcgtcagtttcaaatacacctcgtcccgtgataagctgcacaacctctataaacagtgcaaacccaaacccgcacaaatatattttccacgctcttttaatctttccaaaacaaattggtagtaaaaatccaaacggcacgaacatacatatattaagtatcagatttctccattcctgtgcactaaaattgtaccaggcctctttgtacgaagaaaatggtttaaagttagcccggtactcaaatcccccaaaaccaatacctcctcttagcaatgtcacataaaggacaacaacaatgtatactgcaagtacacacaccagtcctattctgccaattgaaatctgttttttaccatgcaatatttttttataaatcattttgtagcctaaaagccagattattgccaaaaaagccactacaatagtggcaaaaataatggcagactttcctaatctcataatatctgatattctcattacattctcctcatacactgcattttattcatctatatacaaattttaaagctgcgtgtctccgttaaaagtttattattctacgtctttaaccacttgctgcctgatgaatatatacgtttctaaaaaatctttataaaaatggtaccatatacattggaatataataaattccgttttcccatttgtaatcttttgtatgaacaacatatttgctacctatacgattactaaacttgttgcaaaatgcatcaagtgatttatgcgttctataattaccggatttcacctctaatggacatatcttatctttaacagaagttaaaaaatcaatctcatacaaatgatttgaagtttcacttttcatcgtgtaataaaacaaattattaccttttgctattagcatctgtgccacaacattttcatagacatatcctaaatttacatctagtttgtccgaaagtaacttattataaataatattctccgtatattttttatccttaaatgccaaagttataaataaaccaacatccgaattaaacaatttatatcgtcctgcagcctttttattctttataagataccttattgtttccgctgatacctcatctcctattgcccataagaactcctcaaaatccataggaaacatagatattttatgttcttcgcttggaatcaaaatatcctttgtattcttttttattgataataaagagcctgtttcaatatacttatatcttccatccgaaacgagatatttaattgcctgcctagcctttggaaataactgaacctcatcaaaaataattactgactctttctcctataacctggttcccattaactgctgcaattgcaaaaagaaaaaatccagatcatacatatcatcaaatagatcaataattgccttacttgtatgagcaaagtcaatgagaatatacgatttaaactcctttttgcaaattcctctgcaatagttgatttaccaactcgtcttgctccctttatcaagagtgcatatttatcgcttctgttctctttccactcatatatttcatcgtatatttttcttttaaaaactggtttatccatgcataaatccacatttccgccacaattataacgcaaatcccctttcatgtaaatctgaattatagtcaaatccctattagttttctcgcgtttttaacgcatatccccctttgattttcctggctattaaatttacatctatttcttcatcttctcattatgtacatatatcacagttcttacacaaaaatagtatcacatatttttattaaagtatcctgtctcttcccacaccttcttatctggacaataataactatattctcttgaatttccaactttcattgctgttccaaattttaatattccttgttgtatgccaattcttatatattatgcatcctttccaattgctttagcaatctctgcgataggcacatttctatgtgttacctgttagttaccggaacattttcgtgtgttttgaaggtgtctgatagattttcagaatataaagaaaaccccgaaaatacaggattttcggggtctgttgctctttttcgatattcggttgaattatctctttgttaacgttttgatatcctaaaaagcccataaataggggatttgtgtgtcccagtgttgcatatatgttgtatgcgattgactgcccacacattccctttttgctttattactttgatatgctgtgattacattctatctatcccacttgtcacacagcgcatttatctggtctgcaaacttgctcaagtccttattagccataccctggcacttctggataacagatacaagcctctggcctgctgccacaagacggtcaaatatagtcttctctctgcttgccatgccatatgcagcctttttctccacaagcttgcgggagccatctgccaccttctgattcgtgataaggtcatatgcatcaccactgtacggtgccactgcatcatagccaaaggtctcatgcacatggttggcaaaggattctgctgtggattcctctccatgaactataaatacatgctccggcttgttttttattgcaccaagccactcggtaagctgatttttgtctgcatgtccactgatacccggcagatttactatgcttgcccttacttctatttcctcaccaaaaagcttcacctttttagcaccgtttaaaagtgcataaccaagtgttcccggaacctgatatcctacaaacaaaactgttgaatcacttctccaaagattatgctttaagtggtgtctgatacgtccggcctcacacatacccgatgctgagatgataacctttggcttcttatcgaaattaatcatctttgactcatccgatgatactgccacacgaagtccggggaacttgattggattgatgcctgccgaaataagctccatagcctcctcatcaaagcagtccgatacattctcatgaaatacatttgttgcctcaacagcaagggggctgtcgatgtaaacctcaaaattcggatgctccggcagcagattctccgtctttatacgcctgataaagtagagcatctcctgcgtcctgcccactgaaaatgccgggattaccagattgccgcctcttgtaaaggtcgcattgatgacctttgcaagctccaccgcgtaatcaggcggcgtatcgtgcagacgattgccatatgtagattccataaccacataatcagcactgtccacatactgaggatccttgattagcggcctgttgtgatttccgatatcacctgaaaagacaatctttttggtcacattctcctcagtcacccacatctcaatggatgaggagccaagcagatgacctgcatccacaaatcgtaccttaagccccggacatatctcatacacactgttgtaatcacacggtgtaaaatgctgcatgacattctgtgcatcctccacattgtacataggagtcacttccggtcttccggctcgtcttgcctttcggttcttccactcagcctcaaattcctgaatatgcgcagaatcctttagcatgatgttacataaatctgttgtcgcctttgtcgcaaaaatggtgcccctgaaaccatgattgtatatgagtggcaaaagacctgagtggtcaatgtgtgcgtgtgtgacaaacacatagtctatgagcgaaggattgaccggtatctcctgattcacgtacaaatcagctccctgctccattccacagtcaataagtatatgtgtgtccccaaatgtcagatagtgacagcttccagtaacctctctgtcagcaccgataaattccaataccatactaccatctcctattctgttttatgataaaaatattataccacacttatgccattttctgtatttctttcttcaatcttgccattatttttttttcgagccttgatatgtatgactgtgaaattcccagaatatctgccacctccttctgggtcagctccttattctccacacggtttactccaaatcgaagctctattatctgtctttcacgctcgttcaatgacagcatggctttttttagcagtgaaatctcaacctcagtctcaagatccttatatatgacatcctcatccgtccccagtatatctgataaaagcagctcatttccgtcccaatccgtgtttagtggctcatcaaaggaaacctcaagcttcactctgttgttgcgacgcagatacataagaatctcattttctatgcatctggatgcgtatgtggcaagctttattttcttctcaggattgaatgtgtttatcccctttataagaccgattgtgccgattgatataaggtcctccacgcatactcccgtgttttcaaatttttttgccagatacaccacaagccttagattgtgctctataagctgcttttttgcctgttcctttgacattgccacatttttatccaccaatgcaatcagacagcacttctcctcatctgtctcaagcggaggcggcagcacctccgtccctcctatgtaaaacacctcatttgtgtgcggcttatttccccagagtattttccatacccgttttattactaaaaacagcttcattcaaaatcatatcatatgcattgtcctcgaataaactatccgatgctcttcccaccagcacattatgtaaaatcagcttaccatttcccttcatgactgtcatctcatcaaattcacacactttaatgctcccaccatcatttcccaggctcttgtacggcacatcaaaaaagccggcatcttctcctacaatatcaaacaatgcactcccgcctatgtgcaccggaatctgctgtggctgtttttttagcagatttcccgtatcatacaaggctgtggcacaagctcttttaccatcctttaaaagtgtgaccctatatagtcttctgctctcattacttcgttcacagaagcactttaacactatgtatgatatgacaaaaccaaagcatatcataactgtcgcatcagagctgaaaaagctgtccagagctgttactatgcctccggtcagcaccgttacaaacatacatagtgcaaaaagtcttagaaacgggatttttctgccaacctgtctgcctattgcaagccttgccgcaagcggtacgaccaccagaacagaggtccatttataaaacgcatagctgcctgccaaaagaagcagtacacattcacataccgatgcacccaccgctgaagcaatcagacgtaccactttcccgatcaatgggatttttagcatatatatgacaaatataagtatgagacaattggtgataaatgtacgaataagaaaaatatcgagataaaatgcatagataatttttcacctcactttcacagacaagaatagcgtaaaagcaggtttttaagtgccgtaatatgtcgacaataatcaaaaagacatgcagccaaaaagctgcatgtcctataaactatcgtcttgaattcttaaggaaatccggaatattaatctctaccggcttaaccgtgctctcaggctggcgtggcttctggatacctgtatatgcatgtgcaggtgctgtctgctgttgctgggcagctgtatgaagtcctgctgttgctgtggactgtgttcccatgcctgaaacaggtcttgcagctgtctgattcggatataccatacggttttgcataccgcctgccattcctgcaccagtcgctgcctgcttgcccggcatatctatcttctctgaaacatcctccagtcctgtagcaataacagtgatagaagcctgatcagtcatgctctcatcaaacttggcaccaaagataatattagcatcctctcctgccagatcctgtacgtagcttgctgcatcgtttgcatccataagggagatatcgcctgagatattgataattacatgtgttgcaccatttatctttgtctcaagaagaggtgaagcaaccgcaagcttaacagcttcgatagccttatcatccccctgtgcactaccgataccgatatgtgccatacccttgtccttcatgacagtctgtacatctgcgaagtcaaggttgataagtgcaggaagattaataagatcagtgattccctgaactgcctgctgcaatacctcatctgccttcttgagtgcatccggcattgttgtgcgacggtctactatctcaagaagcttatcatttggaatgacaataagtgtatcaacgctctctttaagtctctctattcctgaaacagcattaatcattcgctgctttgcctcaaatttgaatggttttgtaacaacaccaactgtaagtatgccctgatcctttgctatctttgcaacaacaggagctgcacctgtaccggttccgcctcccataccgcatgtgacgaataccatatcagcgccctttactgctgcctgaagctcctctgcgctctcctcagcggccttctgaccgatctcaggctgcgcacctgcgccgagtccctttgtaagcttctctccaatctgtataagtgtaggagccttacaaagctgtaaagcctgcttatctgtattgatgccgataaactctactccaccaatattctcatcaatcattctgttaactgcattgttaccggctcctccgactccaatgacaataatctttgcgctgttatcagcctcgttagttcttatctcaagcaaggtgattcctcctctttctttcccaaaatttaattttctatataaaaatatcgaatcttcttaaactcatttattctataatataatttttctccaaaataatcaactataaaatatgattttttttatttagttttacattattctgacttgtcaaacacaatatttgttgtttcttccgtccagctctctaaatgtagtgtaccggactgttcctcaagcgatggcatgatagccttaagcctctctattttacgtgtaagctttgtcgtgtcaccaattatcacactcacattaccatacttgactaccggtgcattttgcgcaccataatccacagaatccggcacaaggtcctgcctttttaatccctgtgtaagctcaaggatatcttttagcatagtctgcttaataggcagcttctcataaagcactaccttgtcacagcttatgccgtctatacatggcacacccggcaccgtgtcagaggatgtttccaccacaaagccatccttatcaaaatatgcattctcattaattcccggaatatatatgtatccaagcattcctttttcataaactgatatatgaagagtatgcggactattcaggcttatgctcattgtatcaataaacggtatttttttagtatcctttaccttatatttcagatagacatacaatgagttccatgaatacttatcattaagcaccgcatcctctatagtcttttggtcgtaaagctcattgccctcgacaactaccctttttaccgtaaacagcttaagtgcaatgagaaacagtatcgcgagcactgctatcgtaattagcagtcccataaaaaaatgctttaatctctttttatgttttctttttttcttaatcattatatttcacgccttaatctacacattttcaagcctgatgcctcttgacacagacaaaacaagccctatttccgccatcaggaatatgattgacgtacctccatagctgataaacggcagaataacaccggtatttggaagtgaattggtaactaccgcaatattcagtatcacctgtattgcaatatgactcatcacaccaatcactaaaagtgagccatacaaatcccttgcattgtttgcaattaccatcatacgccatataagcagtataaaaagtaaaataaggcagatagctccaaacagtccaagctcttcacaaataattgtaaatatcatatcattttgtgactccggcacattgccaagcttctgtaaactctctccaagtccttttccaaacaatccgcccgagcctatcgcataaagtcccatcatagtctggaatactgcgtctgttcccgcagtctccggatgcagccatgcctcaatacgtgtacttctatagcctgccagcatgacaaacgccactgcaaacacaactaccgccactgctacaataataaactgcagatactttgggcttgcgacaaacaacatacagaccgaaatgcctatgatgataactgccgtactcagattgctgattgcaacaactattatgagcggaataagcatagcaagcacctttaccagacttaaaaacttatcaaactgcttgggtatcttgtctataatcatagccataaacagtatgaccgcaattttagccacttctgaaggctggaactgtattggtcctatgccaatccatctcgatgaaccatgtgagcttgagcctattttcggcacaaacacaagcacacacagtataagcgatactatatacgcaaaaaagccaagctttttccaatatctgtagtcgacctttgccagaaataccataggtataagtcccagtacaatatttcgtatctgaagcttaagatagtgcatgctgtcatgatttttgatggccgatgtgtatgcactcgagctatatagcataacaagaccaaagcagagcagaaatataactataaacaacaggttgtagtcgaaataaggtattcctttttcttttttttctttattcttgctacttcttctacgctttcctgccaaaatatttactccttaaatccttttactatttccttaaagatacgtccgcgctcctcatagttaggaaacatgccccagcttgcacatgcaggtgataagagcactgcatcacctgaaacagcatgctcatagcaataatttactgcatcctcaaacgtatccttctttacagtattcatgaatccgtgtctgtgtgcacactcttcgattttatctgcagtctgaccgataagcacaagctcctttactttgccgtcaaaggcctctatccactcatcatactccgactgcttatcatatccaccgccaatgagaagtgtcggtctgttcatggcacgtataccctgaatggctgcatcaggattggtgccctttgaatcgttgtagaatctgactccacgcttttcggtcacgtactctatcctgtgctcaactgccttaaataccttaagcacctcgacaatcttatccatcggtaccccaaagcttatagacatggcacacgctgccatcacattctcaaaattatgctttccgaggagattcagctcgtttacatcaattacctcatcgcgtacaccgtcgtgtgcgtatatgatgatatctccgtccagataaaatccctctgaaagctcagacttactgctgaaaaatataaccttagcagggcactttgctgcaaaatctctaagcacctcgtcctcgtaatttaacacgcagtaatcatctgctgtctgattttttgtgatatcctcctttgccctgatgtaattttccatagtatggtgtcgattcagatgatcgggtgtgatatttaaaattgcgcttacatgtggcttaaaggtatctattgtctcgagctggaagcttgatatctctgcaaccgttactgtctcaccggtgcttcctgtgaccattgatgtataagggattccgatatttcctaccactctcacatccttaaagtaattcttcattatctcacctgtcagagctgtagtggtcgtctttccgttggttcctgtgatagcgatgatctcacctgccccaaatgtgtatgcaagctctatctcaccccatattttaacgcccctgtcacgtaaggcattgaccataggaatgtctgttggtactcccggacttagcacagccacatcaaactcatcaatctgttcatctgtcaggtcgcctaaaataagcggcacctccttaagctttggtgctttctcataaagtgtttttgaatccagttctttatttccatcaaacaatactgtatcgatgccatttgcgcacaaaagttcagtcgctgcaatgccactctttcctgttccgacaacaagtaccttttttccttgtaagctcatttttattcctccatcttttattgcagccatccgtatggatatgtttaacaaatcaacttctccaaacgactgccttaatcattaaattatagtatacgttatttggttctatttcgcaagagcccgtaaatcagttaaacactcctatctcctgtgcatacggtatgatttccctaaatatttcagctgcaaccggtgcagcgattgttcctccatagtatgcaccgccctttggattatttattttcacaagcaccataagtgccggatcatccaccggataaaatccaaggaacgaggctatatatacattgtcacttctcggaagtgtctgcgatgtagcagtctttcctcctatcgcataaccttcaacctttgcattttttcctgagccctctgctaccacgccctccaaaagctttcgcagtgtatcagatgtctcttcactgcatatacctgacgtctgttcaaaggacagcacctcctttaccgtaccttcggtgccatgaatctccttacctatatgaggagtaattctgttaccaccatttataagcgatgatactgttgtcataagctcgatgggtgtgagctggaatgactgtccaaatgaaattgttgcaagctccacctggcctatcttatccggctgatgcattatggtggcggcctctcccggcaaatcaatacctgtcttatcaagcagaccaaacctcatgaaatcagcataatacctctcactgcctattctaaggcctagatcaataaagaccggattgcatgaattctgtattccctgcacaaaggtctcacttccatgtcctgttctcttatggcagtgtatgcgtctgtcctccacagtaatatatcccgggcagtaaaaactgtcatcaaggctcaccacatcctcctccagtgcgattcctgccgtaattatcttgaatactgaaccgggctcatatgtatcacttacacagccgtttctccaggcttcatcatggttttcacatgaaaaaggatcattcaaattatattccgggtagtcggtcatggcatatatttctccgtttttagggtttaaggcaattatactcacactgtctgccaggttttgtgcatatgccatcattgcatttttctcacatactttttgtatatttatgtcgagtgtagtgacaagtgtgtctccttttttgggagcttctcttctctccttatagcccttcacctccacacctctgccatcacatacagtgtatatccgcccttgtgtaccacgcagaatttcatcatatgtggtctcaagcccaacaacaccctgaccatctgctcctgcaaagcctataacctttgaaaacagttcatcaagcggatagtacctgacacttgactcgtcaacctttatccctgccaagccatatgatagtattttatcgcctgtttttttagagacattgttctttattttttcaatggatgtaaccttatccaccttactgcggatagtcttttcgtcaatcgaaagctcactgcttaaaacagagatgactgcttccttgtcggttatctgattgtgtataacgcttatgttatatgcagtttcatttgtcgctattatcctttcatttctatccactatatctccgcgtattcctgcaatatcacgctctctttcctgaagcgcacttgcctttttactgtaataaccgccttttactatcatgagataaaacagtctgaaacacaaggcgataagaacagctgtcagtatactgcaaaatacgcatatttttcttctgtagcgcgtattgttaagtatcatgaacaaaaatgcctcaatatttttacactaatatatgcaaaaaatattgaggctattctctattcgccctgctcaccctcctgggtgaccttttctcctgtcggaggatttgcgcctgttatcgtaaggtcagcatttacaccggtctgctcctcatcagggtatatattcatatacggaagtacttcctttaatatctctctggtcaggttctgtgcatagttactgtgaggctgatcctgtacattcggctggtcgattacagtgtaaataacaagctgcggatcctgcgcaggcacacagcctataaatgatacaagatagcagcccctctttctaaggtgcgttgtctcatcatacatctgcgctgttcctgtcttgcctcccattgagtatccgtcaacctttgccaccttaccggttccgtttgcaactacattctgcaggtagtttttaagtgtcgcacttgtattctctgacactgtcttttttagcagtgtaggctcaattgtctttactgtattgccgttgtcatctgcgattttctttactacgtgcggctgataataatttccgccattcaccagtgaggaaaatgcactgaccatctctatcatggtacagttatagttctgtccgaatacgtttgtcgctaaatcgacaggctttatattgtcgagtgtatacatgagcgttgatgtatttgcctcacccggcaggtcaacacctgtcttttgaccaaagccaaatacactctgatagtacagaaaattttctgcaccaatcttatatgacatctgcatgagtgcatcattacatgaatccatgagtgccttttcaagtgtctctatgccatgtccgctacggttgacgcatgataccttttcactgccaaacatctcgtatccatcacataaaaatgtcatatcagtagtgagcgtgcctgtatccagtccacatgccacggtaaaaggcttctgtacggaccccggctcatatgtatgtgtaacacagaagttctgccacagcttattcagagtatttaatgtatcatcatcactcattgcattaagctgctcttgtgtatagtaatccttcatattcttcggatcgttcagatcaaagtttggataattcgccatggccagtatctcaccatttttaggattttctataacaactgcaatattttctgcgccaagtccttctcttgcattatttgcataagtatctgagaacagttttatcttatcctcaacaatcgactggatatttgcgtctatagttgtgtacagggtatttccgttttgtgcagcaattactgttttctggaaatcattgtctgcattcagatagccgtactccctgccatttacaccatttaaagtgtcattgtaatagttttcaagtccggttgtacctacatttccggcggaggtaaagccgataactgagcttgccagcgttttaaacggataatttctctgatactctgtctcaaaccacacacccttgatgtttggattcttcagattgcccttttcgtctgttgcatcctgcagctgtacaaatggctgaattgcatcatatgacagcttttttaacagtacaatatatttgttatccttgctgttatttgcataatcctcaagtgttgccctgtctaaatccggaaagcactgtgtcagtgcatctatcgtcggagttatatactctttcttactggtcataaccgagcaatcaagtacgacattataaacagccacactcgtagcaagcactgtgccgtttgaatccacaatatttcctctctgaaacggtattgttttgctgtcatatgactgtaatgatagtacctttttagtatatgcgtctccgcttgtatattcaataaacatcagcctgccaatgagtccaagcatggctacaactattaacataaacaacgcaaacagctttgttttcattttgcgtccaatttttcttaccggtctttttcttgtcctggctgccaatatgattcctccaatttattccggaatatcattgtactgatccatatagttgttcttatcaattgagtaataaactatctgatcctgtgaagcatatttcatgccaagtctgttgatagctgcatccttgattgcatttaaatcgacagatgtagtaatctgcttgtatctggcatcattatcagccttcatatcatttatccggctctcaagtgctgcaacctcattcatctgctgtgtcacatttgaccttatctgaataagtgaaacagatacaagggctgaagctgccacacacgctgtgagaaaggctacaaatgccctgttcattgagagtgctctctcctgatttcttcttgcagattttcttctgtttttctttcttcttatttcctcaagctctcttgtcgatttctgtggtcttctgaccggtgctgcctcgtcaagctctcttactgcgttcccatttatataataagtagttttattcatttagctgctccttttgctgtcattctacaattcattcttttcaaacacacgaagctttgcactcttcgagcgtgaattctcttcaagttccttttctgacggaaggataggctttctggtgataaccgttcccttcgatttattaccgcatacacataccggaaaactcggtggacatgtacatggattttcgttttttttgaaattggattttactattctgtcctcaagcgagtggaatgtgattatacatatcctgccgcccggattaagtaaatctatcatgtcatccaggttgtcccttagcacatcaagctcatgattcagctcaattctgatagcctgatatgttctctttgacgggtgaccaccggtagctctgaccttttttggtatcgctgcctttattatctcgttgagctctcctgttgtcgttatctcttgcttttgtcttgctgctacaatgtgctttgcaatattctttgcaaacttgtcctcaccgtaatccctgatgatacggtacaggtcattttcgctgtaggtatttactatatcccttgcagtaagggcattcctgtcatccatacgcatatcaagcggtgcatcctcactcctgtaggtaaaacctctctttggtgtatcaagctggaaggatgacactccaagatccagcataataccatccaccttttcaattccgagtgaatgaagcacattcttcatatcagaataattgcttctgactatcgttaccctgtctccaaactccgcaagtctctctcctgccgcctttatggcatctgcatcctgatctatgcctatcagcctgcccttgtccgaaagtctcttggctatctcatatgagtgcccggctcctccgagagtaccatccacatatattccgtcaggacggatgtttaaattttcaattgtctcgtcccttaagactgaataatgcttaaattccatgtggtctctccatttaatatcaaatgcctatgccaagctctgccatatgatcggctatctcatccatatcgtcaaaatcagagttctcaaggtatctgtctttgctccagatttctactctgctgtatactccgacagatacaacttccttatctatacctgcgtattctcttaagttcgccggtaagaggattctgccctgcttgtccacctcacaggtggctgctcctgcaaagaagaatctcataaattttcttgcttctcttgatgtgagtggtttgtcgcgaagattttcctcaatgcgatgccattcttcgttggaatagacgaatagacagccatctaagcccttggtaactacgaactcattgccaagctgttcacggaacttcgccgggacaatcatacggcccttggcgtctattgaatgattatattcgcccatgaacatggcatccatcctccttttcctcattttgaagttttccaccacttcactccacttatatggtatttcgctccactttccaccacttggttacaatattacacctaacagcccacaaaatcaaggctttaagccaaattcccataaaaaggcaacaaaaaagacgctcagtcttttcgtggactttgcgccttttttataaaatgatatgaaatttaatctttagtggtggattgtggtggagtgtccaccattttgcccatttttctctgcttatatctgacaattcctatccatatggctgatactgccaccaaagtggcggcgagtgccatagacaccggataattgatatgcggtatgagaagctggtctgtacgcagactttctatccagaatcttccgacaccatagcctagcaaatatagaagaaacacctctccgtcaaaccttctgtgcttaaaataaagcatcaacaaaataaataagcacaggttccaaaaggattcatacaaaaatgtaggatgcaccgagatatactccactccgtctaccacagttgtatgtgacataagcttttcagtcagatccgatgtcctgacagctgataccggaagctgcatggcaaaaagtccgtcataataatcgccaaatgcctccctgttgcagaagtttccccatcggccaatcgcctgtcccagtatcagtccaagccccgccgtatcacacaacagtggaaacgacagctttctgatctttgcaaaaacgaacgtggtgataattgctgctatcactcctccgtaaattgccagtcctccctgcctgatattgaatatgctaagcaggtcgtccttgtacaaatcccacctgaacaccacatagtatattcttgcgcctatcaccgagcatatgattgccacgagtgccagatcaaagtatgtatcaggattttgtcctgattttttggccacatagcaggccacgcccagccccgcaagcataccacatgcgattattatgccgtacatcgcaatatcaaagcttcctattgatatgctctttatcacatgctgcagatatatatgaagatgtgggaagtttatattataatccatatttttcctttcctgactgtaattgctgtctatcacactgtaatatatacggcagcaatcacaaattacgaaaatatatgtacccggagcaccataaacctgatactccgggcaactgtcattatgcgcttcttagtctacgcctgacactcaaagcttgcacactctgtactgcacttgtttggtgtacagtttttcttgatgccaatctgattggccatgcagctattgtggtcattgtacttacactttgctgcatcacagtgcacatctgtctccttgtgaatagctaactctgcagatacctcacagtcacaggccttatttgaaaagctgccacactgtgtatcgcaggctttctttgccttagttcctttcacatcgatttctctgagcttacagcagttatctgcattatacgcacatttttcaacattacaatcaagtcttgtcatacttttgcctcctttgcttatgcataggctagtatgtcctgattgattttttttatactttttaatcgattatctgtgtttttcctcttccggaagctccactctgatttcctttgtacggatttccttgcaaatctggtcgatgaaatctgaaagtggcttaacaccctcatttccttcaaaacggcttcttaccgatactgtgccgtctgcctcctcgtcagctccgacaacaagcatatatggaagcttatccatacgagcctctctgatcttgtatccgatcttctcagctctgttgtcaactgtcacatcgacatcattgcgcttaagctcatctgctacctttttagcataatcagcatacttctctgagataggaagcactctaacctgctcagggcagagccatgtagggaacttgcctgcgtagtgctcgataagccatgcaagtgtacgctcatagcagccgagtgatgtacggtggataatgtatggacggattttatcgccgttttgatcaatatagtacagatcaaaattctcagcaatagcacagtcgagctgtattgttaccatggtatcctctttaccgtatacgttcttggcctggatatcaatctttggtccgtagaatgcagcctcgccgtcggcctcaacaaaaggaacattttcctcaataaggatgttacgaagaacctcctgtgttgagttccagtactcatcatctcctaagtacttttctgtgttctttggatcccattttgaaagacggtatgtcacatcattctcgagtcccagcaccttaaggacatatctgttaagattgaagcatgccttgagctcctcctcacactggtcaggacggataacattgtgaccctctgagatagtaaactgtctgacacgtgtcagtccgtgcatctctcccgaatcctcgtttctaaacagtgtggatgtctcacccattctgtaaggcagatctctgtatgagtgctgctttgccttgtatacataatactggaacggacatgtcatcggacgaagtgccataacctcttcctcgccgtccttctcaggatctccgagaacaaacatgccgtcaagataatgatcccagtgtcctgaaatcttgtacaggtctgattttgccatgagtggtgtctttgtacgcacatagccccactccttatcctcgaggtcctcaatccatctctgcagcttcataatcatctttgtgccctttggcatcataagcgggagtccctgtccgattacatctactgttgtgaaaagctccatctcacggccaagtttattgtgatcacgcttcttagcctcctccattctctcaagatgtgcctttaaatcctctttcttattgtaggctgttccgtagatacgatggagtcttgccttgtttgaatcacctctccagtatgccattgatgatgatgtgagcttgaaagcctttactccctttgtgctcataagatgtggtcctgcacataaatctacaaatccaccctggtcatagaatgaaatttcctcaccctcaggaagctcctcgataagctctaccttgtacggctcatccttttccttcatgaatttgattgcttcctctctagggagtgtaaatcttgttatctcatgaccctgtttgatgattttcttcatctctgcctcaagtgcatcgagatcctctcttgagaatggctgtgaatcgaaatcatagtagaaaccatcgtcaattgccggtccgattgtgatttttgcatccgggaacagattctttactgcctgtgccagcacgtgtgatgctgtatgtctgatgacacgaagtccttcctcatcacttgctgtgattatattgagtgtgcagtccttgtcaagaactgttcttaagtcaacaatttctccgtcaacctctcctgcgcaggctgctcttgcaagtccctcgcttatatcttttgcgatttcatatacgctttttgcttcgctgtactcttttgatgagccatccttcaatgttatcttcatggttatctctcctttattttaatataaaaatccccgacaccgcattgctgcgacatcggggacgataagctttgttaccgtggttccacccacattctttccgcctgaaaacatactgcttgtctgtatccgacagaaactcatttgactataacggtgtcaccgggctttattggagccactccaagctggtgttcggtatatcatccaccggggagctttcaccactctttggactttgattctcgtcttccaaggcttccctctctgctgcttttaatatacttactgtgctcttcaacgtattgttattatgctaatgttcctttcaaaaaatgataatatacttatttttctaatctgtaaagtactttatgcattttttccacaacattttttatatttcttgcccgaaccgcatggacatgggtcatttcggccgattttcttacctactaccactgttcctgacttcttctgctcgaggtaaagcgcatgctttgtctctgcgtcaaagatttcatcccatgccgggagattgtaaagccagtctgcctttgcatctaccatgttcttatagagcttttctttatcgaaaacaaggcttacctttgtgtcctcatccatctcctcgattgggtttggtgtgacaaggctgtcattgattccgtctaagaagcctgtcatctccatgattgataactcatatttctcagcaagctctttgactgttccctctactgcctcatccggatttgcgaggagcttctcatatacacccttctccaagaggaaataatgctgccaaaaacgctgtaactctccctgatctgctttgtcattgtaggcaatcttgtgccactcttctaataaagccatttttactaccacctttatcttttataaactgatacgaggccaaacagcctcaacttcacatatggatgtattataccaaaataacagcttgacgtcaattttgtttttttatattataataaataaaaaactattcagaaccactgagaacaagaaaaactgatgcgtcatgctcgcatgtaagcagcagattttcttgttctcaaggtggctcgaatagagccaccccacacatatgagcaaaattagctgtgtagcagctagacagcacgagtatcgtgcgtttttgcgaatgtgcgtgggatggttctgaatcgttacattactaaaaccacggagaacaattcatgaaaaagacaaaacgtattctggcactgatcggtgccatccttttattacttttatatgttgtggcatttgttgccactatgctcgatcacacgagtgacatgcgctactggaaggctgccgttgccgcaactatcattatcccggtgcttatctgggcatattcatttgtatacagacttataaagggttctgatgataaagaatccgatgatgtaaccaaaaaaccatgaaatgcaaaatcacacctgaattatcatctaaagactggaaagaattctgcagccggtttcattttgataacgataagctgccgcttatccgggcaatatacaccgcaatgcttccattggtggatgcctttgcatattattccataaaacaggatttgcccggggtatccctggcacactatgcctacggcctcgtgacactcggaaacggtgtagacgagctgtcagagctgtatttaaatcatgagcagcttgaggaggcctacatagcagactgtttaagccttatgcttttgtcaaacgcatatgagcagtttgcaaaggctgtcgaagaagaaagctctctttatgccattgagctgtcatttttaggcgatgaatatccgcttgagctgctgcctgagatttttgagcacgtaagccctgatggtatacatctcaccggttcaaatatgctcatgccacttaagacagccgccctcataataaagcttgactcacaaaagcagaaaaatatcaaagagctctgtaatacctgcgcgaactgtaaaaatctgtcgtgcccatcaagaaaggcccctggtcctaagctgccacacacctatggtgccatgcagatttttaatatcagacattgaagcccttctttttctcatatgagcctctcagtttctcaaccagaagtgtcagattcctaaacagtgactcagccgcaaagccaaacactatcatgagaagaatacatatatttgacaaatctgtcagtgcaaacagtttctttaagaagaaacccgaaaataccagacctgctatatttccgataataacagcatatttcattccatttagcggctcactgattttaaagagaatcataaagcccactaccgaaagtacaagcgtcgctatcgttcctatgcttgcatctgatatacaaaatacttctccgcatacgacaagcgctccgacagctattacatccgtaagtccacccggcagtgcctttagcatgacattggtgataaagtgcccctttatcctgtccttattctgctccagtgccaataagaatcccggtactcctatggtaaacatactgatgagcgatacctgtgccggctcaagcggatacgtaaccataaggataaccgaaaacagtgaaagtaacagcgagaatatatttttcacaagaaacaggcttgctgagcgctggatattgtttaccaccctgcggccctcatacaccacatccggcatgtgtgcaaagtcagagtccaaaaggacaacctgggctgcctgggctgccgcctcacttcccgatgccatagccacactgcagtcggcatccttcatggcaagtatatcgttgactccgtctccggtcatcgcaaccgtatgacctttagcctgtaaagcctttacaagctgtttcttctgctttggtgtcactcgtccgaatacagtatatttattcactgcatcggctattttatcctcagtatcgagtgttgccgcatcaacaaagctttctgcactttctattcctgcctgtatggcaatccttgaaacagtacgcggattgtcacctgaaataacctttatcgcaacaccctgactcttgaaatactcaaaggtctttactgcatttgctctgataggattggcaagtgccacaaatccaagcggagtaacactgccatttatgccattctccacgttctccccattgtaccttgcaaataaaagtactctgtcgcctttgtcagcgtacggtatgatttcttcctcaatgcgcgcaaagtcttcgtgcatgataaactccggcgctccgagcagataagttccgtcagaaaaagtaacgctgccatacttgaggctcgacgaaaatgcctgctgtgaaaccgctgtacgatgcagtgcagatgtattatttgtcaaagcttccgctgcatatgcttttagtgcgagcatagtcgcattgttgtcaaccgaagcatttgcataatctaaaataagacttttaagctcatctaatgtcaaagctgtctgtgtgccatctgctccactgtttttacagagaaaaatttccttaagcttcatatcaggctcagtaattgtgcccgttttatccacacaaagcacatccacacgcgcaagcgtctcaatacttttcatatcatgaagcaaaacctttttccttgcaagcttcatagtgcttaaggcaagcgccactgtggtcagcagatacaagccctccggtatcattcctataatcgctgcaactgtcgatgtaacactctttgtgatagactcaccattcacaaaatgactctgccagaacaatataagcccaatcggaataataactatgccaacccatttgacgatcaaattaatggagcgtatcatctctgactgctccttgtcacccattgattttgcctcaaggctcagccttgagatatatgattcattaccgaccttttcaagccgtgcatagcactctcccgatacaacaaagcttcccgacatgagagtgctgccctctgtcttttctacctcatcagcttcacctgtgagcagtgattcatttacctgtatatttccggatatcacaaccgcatccgcacaaatctgctttcctgcggtaagtaaaatcacatcgtcctttacaagtttctccgtactaatctgctttacgctgccgtttctgatgacatccgcatgcggagcattcagtaaactcattttttcaagagtcttttttgcgcggatttcctgaacgattccgattaccgtatttccaataattataggcagaaatgtcaggtttctgaaagaacctaccattatgagaagtatcgttatgacaagaaatataaggttaaaatatgtgaaaacgtttgaaatcacaatttcctttgtcgtcttgtctgtagatatatcagccctgttggtaagtccttcctccactctctgccttacctcttcatcagtaaggcccgtgatatttatactgttgctgtctttgttcatctgattcatgctattcaccgttttccctcattattctacatcataataatgatacattttgaccctttaatcattataatggtacaacatcagcacgatttcaatacctatttcataaaaaaaagatgaactatttcttaaagttctcatttttaaactattaatccattgctactcactttcagtctcagtactctcactgtcttccgttgcaatcatatcatctatagaatccggaattgttccaaggattgtggtacttgaaagatatacatcatcatttaccttgatatagtactcaccaagcatagcgtttttctcaccgattgtgatggtatatgtcttgtcagcagtgtttagctttacgacattctgtggttcatccagcccaaaatcagatgtatccgcatctgaatcaaatttctttgaagcagtgatgcttgttgcgtttccaagcagtgatgtgaccttgctcgtattgattttaagagaggtatcattatcgcagacccactgctcgtcatcatctgaatcaaaagactctgattctgtgtctgttttctcagactccgttgactcggtctcatcggatgttccatctgactttatacggctgaaggtatactcctggccatcaatcagaaatgagagtgatttaacatccgatgagtcgagcgaaagtgcctcaacactgtcgctttcgctctccgaatcatcgtcacttttatatttattgtaatttagaagccccaggtatcccgccagggatgctgccagaactatcgcaagtatcacaaaggtgcgtttctgcttattcattcattttttctcctatttcttatacgcgtttacctgtaatctacttctttctcctcattgcccatacaacgattcctatgataataagcagtattggtacagctatcattatgataagtcccgtaataaccgcctgcagcgtatttatagtgatattgcttaagttgtaatccttcaccggtatcacacttgatgcaagctcaacatttccggtcaatgatgagataacatccttgaacatgtctgcattgttgccagaaacggcattatcatatgaatcatcaaccacataaggcgtaccaaacacaacaatagatgcgccggtgcttgaatcatttacagcaagacctgtagtaaacggtccgttctcatctgagtcctctgccttcgatgtggtgatattcttccagtccttctttaaaactgcactgtctgatgtagaaagcagctttgtatatgtcacatcatctgtatcctcaggataactgattgcacagcttcctgccaggaatacatatccgtctgttgcatctgaggtgtaatctgtcgtctcaaccgttggaagcaggtagagaggattctgataatattttgagctgtcattttcagctaccacaccggtcttgaagctgacattgtaagccgcaagtatcttgttaaagtttgtaagctcgtcattatatgcgtagcagccgataatcattgcctttccaccgccatttaaataatcaatcaccttctgtgcgtcttcctcattgaaatcaacagtcggggaattaatgataatggctgttgcatcttccggcaccttttcctcgttaaagagctctaaactcttaagatttgcatttgccttgcttacaacactctggaaattgcttcctatttccgtttcattgtgtccggttatctgataaattaccgggagctcatctgcatccattgtgacatactctatggcacttgtaatctgtccctcggcatcatagcctgtgatgctagactgcgactgatatccgtaataatatgatgagctgtcatattcatatatatcattgtaatcaatcacctttgaacggtttttgctctcgatgataaggctgtttgtggtaggtgtcgtgtctgtgtaatcctgataaaacttcgggcttgtcgccgggtctacatattttacctttatatgactcgaaagatccttgtatctgttgattgtctcatctatctttgcatcctttgatttcttggaatttaaaacatagattgtgatatcctcatcgagcttacttaccctgtcctttgtatcgtttgtgagcgagtacagctttgtagccgaacagtcaattgatgtgtacttagcaggaagcgctgtcactacaagatttacaaccacacagattgcacacattatgacaatcattcctgctgaaaatgctcctgtgcctatcatcttctttgaaaatgcccatcttctcttctggatagattgagtcgtcaagaaacataaaagcaaagtaaccgtcacataataagctgccgatgtgacactaaagcagccactcacaaaattctcaaatggtgtgtacaaatcaaagcaattaagcacctttgtgagcagattcccacttgacgagatgagccctgtgatggactgcatcatgtatgagaggaataatgccgcaaatgtaagtattgcagatattatcacactctcagatatggacgatataaaaagtcccacggcgatgcatgataaaccgtaaagccagtagccaaacaaagccacatacgcttcactgagcgcaaccttgccgtaaattgacaacacgagcggtgaaagtgcaaaaagtgctatgtctatggtgtatactgctgccatcgctaaatattttcctgctacaatccttccgacagatacaggcgatgtcagcattagctgatctgtctttgtctttttctcatcagaaagcgatctcatcgtgagaattggcactgcaatcatcataataaaaccgattccctttaaatcatatgagatatacggataaccgtttttcagattgtatacataaaaatataggccatacactgcaagaagtgctgcaacaaacagccatcctataacgttttggaaatatgatttgaattctcttttaaatattgcaagcattatttctcatctccttcccctgtaagctcaaggaatacatcctcgagtgacttcacaacagtatgcatctcaaggattggcatatgcattgcacttgcaagctcaaatatttcctcacgtatatcgcagtttgcttttgctataaccatagccttcactgtattctcttcctcagactgttcaaatgtgaccttatcaatatttactatcttctcaagcattcctcttgcaccaatctcgtctgatttgagtacaaggttaatttcctggttctttgacatgagattaatcaggttctctgtggcatcacttgctacaagcttgccctttgatatgataaacacatgatcacacaccgcacttatctcacttaaaatatgcgagctaagtatcaccgtatgattttctccaagctttttaataagctcacgaatctctattatctgctttggatcaagtccaactgtaggctcatccagtatgatgatttccgggtagccaagaagtgcctgagcgaagcccactctttgtctgtagcccttggaaaggttctttatgagacggtttttcacctccgtgatgccggtcatgtccatggcatctgctatcatttcttttctctttttcctgtcgagctttttgagctctgccacaaatttgagatactcatataccgtcatatccacataaagcggtggtatctccggcaggtatcctatacatttttttgcctcctcaggctgtgcaaatatatcatagccgtttatctttactgttccaccatcagcaccgatatatccggtaacaatattcatggtggttgactttccggcgccgtttggtcccaaaagtccgtatatctttcccggctcaacggtcagcgaaagatgatctacggccatatggtcgccatatttctttacgagattactaatttctatcacagtaatactccttcctactaaattgttatgatattagagtataaaaaaagagtgttcaatttgtgaattctgaacactcttttgtacattatttataatttttttaatactatgatattttagctgtactaattgtctgggtactaattgtctgcgcgcacaatcatagcttctctttcagcacctgttccgatgaacttaacaggtactccgatgtatttctctatgaagctgatgtatttctgtgcattctcaggaagctcctcgaaagtcttacagcttgcgatttcatctccccagccgccttttagctcctcatatacaggctttgcgttgtttaaaaccttaagatttgtggtaaagtcttctgtcacctcaccgtttacatcgtagccgatgcagacttttattgtatcaaacttgccgattgtgtcaagatggtttacagaaagtgctgtaagtccgttaagacgcttggcatattttaaagtgacaaggtctaaccatccgcatcttctcgggcggcctgttgtggtgccgtactcatgtccgagctcacggattttgtctccggttgcgtcaagaagctctgtcacatatggtccctcacctacacggcttgagtatgccttgatgacaccgtatacatttccgatatctgaagcagaaagacctgttcctgtaaggatgccaccgattgtaggatttgatgatgtaacatatggatatgaaccaaagtcgatgtcaaggagtgtagcctgtgctccctcaacaaccacctttttgtcatcctcaagtgccttgtgtaagagggtgattgtatcacatacatatggctcaagctgtgctgcatagtcactgtactctgcaaacatcttgtcgaaatcaagctcctttgtataatcagtctcaggatcatataccttaagaagtgcaagcttaagctctgtctgctccttaaggcgctccttgaaatcaggtgcgtataaatcctccattctgattccgcttctctcatacttatcgcagtacgaaggtccgataccctttcctgtagtaccgattttctttgcctgtctcaccttctcaagcgccacatcaagcttgctgtgatatgggaaaatgacatgcgttttttcactgatttttaagtatttatctacatcatatccgtgctcctttaagttgttgatttcctctaaaagaacctgcggatttaaaactactccgtttccgatcactccgattgtatgtcctgataagagacctgacggaataaggtgcattgcatatttaacaccgtttgctttgattgtgtgaccggcattgtctccgcctgtgcatcttactgctacatcagcgtctgccgcaaggtaatcaattaccttaccttttccttcatcaccatagaaacatcctattactacatctacctttgacattttacatgcctcccttgtattttctgacacgacacattgtgccatgttactgattgattttagtggtatatttattattctttgtaactattaataattatttattacaatactctatcttcttagagcaggctattgcaagcgctccgggtcctatatggcatgagaccgaaagtgaaagcggattcatgactatctcgttatttggaaatgctgcctgaacctcttccttaaatgtctccgctgctgcaatatcatgcgtgtatgccatttcaagatttatctggctgccatccggattattgaagcgcttctcaaaatccgacttcatggcatctatcatgatgctctttgcctgctttacggtacgtgcctttgcaaatgcatcaagcttctcaccctgaatctgaagcaccggtttaagctttaaaagtgtgccaagagctgccgctgctggcgtgattctaccaccctttttgaggtagttaagagtatctaccatgatatatatggaagactcaaactttgcatcctctaatatctgctttatctcagctgcattttttcctgcttctgccaggttcttcgcatctataaccgactggcgcattgtaactgatattctctgattattgactacctgcactttgccgtcataatcctgcgagagcatatatgctgtctcacatgagcttgaaagacctgatgacattggaatgtatacaatctcatcattttcctttaaaaactcatcccatttatctgttacatcaccaaccaaaggcatagatgtcttgatatcgccgcctgccgtaagcttctcatagaactgctcctgcgtcagatcgatattctcataatacatctgctcttcgatgtaaaaaggcattggaatcacctcaactccgagcttctttgcctcgtcaggtgtgataccgctgtttgaatcggtaactactataaccttactcattaattctcactccgatataaatattcgttgtcgtattttttccaacaccgctcattataccataggtgtaattgtttgaaaagaagtttttgatggacagtggcgttattttacttacatcgtagacacggctggcttacaccagcctccgtatattcgtggtccgcacagtaggtgcttcttgctcatatccggacattcgtcaaataaaaaatcagaggcaagcgagcttatggtgtttttttacctacatcgtagacacggctggcttacaccagcctccgtatattcgcaatccgcacttgcgtgcttcttgctcatatccggacagcgacttttttctacctacatcgtagacacggctggcttacaccagcctccgtatattcgcaatccgcacttgcgtgcttcttgctcatatccggacattcgtcaaataaaaaatcagaggcaagcgagcttatggcatttttttacttacatcgtagacacggctggattctccagcctccgtatattcgcaatccgcacttgcgtgctacttgctcatatccggacattcgtcaaataaaaaatcagaggcaagcgagcttgcctctgattttttattttcctcattgtctacgattacatcatgcccattccggcgccggctccggctggcattgctggagtgtcctctttgattgtagctactgctgactctgttgtgaggagtgttgaagctactgatgttgcattctgtaatgcacttcttgtaacctttacaggatcaaggattccgttatcaaccatatctacatactcttctgtagctgcgttgaagccggttccaggagctgactcctttaccttgttgatgattactgcaccttcaagtcctgcatttgcagcgatatagtaaagtggagcctcgagtgctttaaggataacctttgcacctgtcttctcatctccctcaagtgtatctacaaactctgcaaccttctttgatgcatggatatatgctgatccaccacctgcgatgattccctcttcaactgctgctcttgtagcgttaagggcatcctccatacgaagcttagcctctttcatctctgtctctgttgcagcacctacacggataactgctacaccgcctgccatcttggcaagacgctcctgtaatttttctttatcaaactcagatgttgtctcatcaatctgaccacggatctggcttactcttcctgcgatagcatccttgtctccagcaccatcaacgatgactgtgttctccttctgaaccttaactgacttagcacggccaagcatatcgattgttgtatccttgagctcaagtccaagatcagagctgattacctgaccacctgtaaggattgcgatatcctcaagcattgcttttcttctgtcaccatatccaggagcctttacagctactacattgaatgtaccacgaagcttattaacgataagtgttgtaagagcctcgccctcaacatcctcagcgatgataagaagtcttgcaccggcctgaacaatcttctcaagtaatggaagaatatcctggatgtttgaaatcttcttgtcagtaataaggatatacggatcatcaagtactgcttccatcttatccatatctgtgcacatatatgctgagaggtatcctctgtcgaactgcataccttctacaaggtcaagctctgtctgcattgtctttgactcttcaattgtgataacaccatcgttcgtaaccttttccatagcgtctgctacgagattaccaacttcctcatctcctgctgagatagctgcaaccttagcgatctgctctttgccttttactttctggctcatattcttaagtgcctcaacagctttgtctgtagctctcttcataccacgacgaagcacgattgggtttgctcctgcctcaaggttcttcattccttcctgaaccattgcctgtgtaagaactgtagctgttgttgttccgtctcctgctacatcatttgtctttgtggcaacttccttgacaagctgtgctcccatgttctcgaaagcatcctcaagctcaatctcttttgcgattgtaacaccatcgtttgtgatgagtggtgcaccgtatgatttgtcaagtactacgtttcttccttttggtccaagtgttactctgactgtatttgctaatttatctactccagctccaagtgctgctctggcttctgagccatatttaatttcctttgccatgatttatacgacctttctatttatttatatatttgatatttaattccaaaatgtaagcagctatgaccggatatgtaaaacgtaccggatctttagcttctatccgtaaattaatcttactctactactgcaagaatatcattctgtctaacgatgatgtactcttctccgtcaagcttaacctctgtgcctgcgtatttagaataaataaccttctgtccgactgttacctgcatcttaacttccttgccgtcaaccattccgccaggtcctactgcgataacctcagcctcctgtggcttctcctgtgctgaacttgtaaggatgattcccgattttgttgtttcctctgcttttaactgctttaatactactctgtctgataatggaactaatttcattgtattgcctccttttatctctgttagcactcatttctttcgagtgctaatttctttctgtaaataaaatatcactattgcatttcaatgtcaacagtgatatttcattttaatatttattttacattttctatatcaatccgtaatgctttaacgcatttttcactccatcatctgaaatatccgatgtgacatattccgcaatttctttagccggtggcattgagttgcccatcgcgattccatgtcctacactctcaagcatttcaaggtcatttacactgtcgcctatcgcataggtttcatcaagcgggatatccagatgattgcacagccatttgatgccggttgcctttgaggttcccttcggcacgaactccactacattttccacatgctcgagtatcagaaaatcatcggcaaactcggccttcacacgttcataatcagtaccatctatcacgtcagcggagaatttattaattcttatctcgccgtcatatcctcttattatatgtgcatgctcaccaagtgactcaaaaaggtaatccacatacggatcatcctcaaagccctcgtcatctatccagtagtctgtggagccctcaagcactacaggcattttacactcagaaagcacccttatgaccttttgtaccatatctgcgctcaggttattttcgtatattactttgccatccatttcaatatagttgccacatgccgcaattattccatcaaaacccatatttaaaagcttctctgacctcacactggctctggcacgtcctgtacatataaatgccagatgtccgtttgccttgagggttgccacagcctctattgtgctttcaggaattaccatgtcatcgtcccatattgttccgtctatgtcaaaaaatactgttttactcatttgctgctcctaatattattattatcatgtcaaacactgctatcttaacatcttataagtcaaatttcaatcagtttatccacagtaccaacacctctagaaagcaataattttgtatgtcaaaaatcccggtgcaatgcaccgggattttgatataaaatgtatgaaataaaatttattaaggagaattgctataataatttgttactgtactgaaagatatgaatatcccatgagactctcatcaacctctctggcaacctcacgtccctctctgatagcccatactacaagggactgtccacggtggttatcacctgccacatatacgttttttacgtttgtagcgtaatgtccctcctgtgtacttacgtttgttctggcattgagctctacaccaaatgcctttgccacatagctttctgttccaaggaatcctgctgctataagcacaagctctgccggaagctttttctccgatccctctaccggaaccatcatgaatctgcctgtcttctcgtcctttttactctcaagacttacaattgtaagctcctttaggttaccgtttttgtccttgtggaactcttttacggttgtcttgtagatacgtgggtcatgtccgaataccgcaatggcttcctcctggccgtagtctgtctttaagaccttaggccactgtggccacggattgtttgctgcacgctctataggcggacaaggcatcatctcaagctgtgtgactgatttggcgccctgacggattgcagttccgacacagtcgtttcctgtgtcaccgccaccgataatgactacatttttgccctttgcagatacaaacttgccatctgtcaggttagagttcaaaaggctctttgtattctgggtaaggtaatcaacagcaaagtaaataccctttgcatctcttccgtctgcttttatgtctcttggatttttggcaccacagcaaaggattaccctgtcatacttcttgtaaagctctgccggctttatatcctttcctacatcacagcctgtgacaaaatgaatgccctcttccttcattatattaacttttctgtcaataatgctcttatcgagcttcatatttggaataccatacatgagcagtccaccgacgcggtcctctctctcatatactgtaacctcatggcctctctggttaagctggtctgctgccgcaagtcctgaagggcccgaaccaatgattgccaccttcttgccggttctgacctttggtggctttggagctgcatatccgtttgcatatgcagtctctattacaccatgctcattgtccctgactgataccggactaccccagtgtccacatgtacatgccttctcgcacaatgccgggcagactcttgatgtaaactcagggaaattattggtcttgtgcagacgattatatgcctgctcccagttgccggtatatacaaggtcgttccactccggaaccaggttatgcagaggacagcctgatgtcatgcctgctattgtcattcccgactggcagaaaggaactccgcagtccatacaacgggcagcctgtttctgttgattttcttttgaaaggaacacatggaactcgttaaagttcttaatacgctcctttggctctacagacgctgcttcgcatctgtcatattccataaatcctgttggttttcccattatctgcgtcctccttagcctcttgtgctggcataaaatgcctcaatctgtgcctgctctgcgttaagacccttttcttccatctgtacaatagccatctgcatacggttgtaatcgtaaggaataaccttcttgaacttaggaagatactcactgaaatgatcaaggatttccttacccttttctgagtttgtaagtgttacatgctcttttatcatttccttaagctctaatacatcgtacttgtttgagacctcctcagtaaataccatctgcttgttggttctcatgtaaaggtcattgtcctcatcaagcacatatgctattccaccgctcatacctgctgcaaagttttttccggtctttccaaggataactacgcggccacctgtcatgtactcacagccatgatcgccgacaccctcaactactgctgttgcaccggaatttcttacgcagaaacgctcaccggcaacaccgtttatgaaggccttaccgcttgtagctccgtaaagtgctacgtttccgatgatgatattatcatccttctcaaactttactcctgcaggtggatatacgatgagctttccacctgaaagaccctttccgaagtaatcatttgaatctccgacaagctcaagtgtaagtcccttagggataaatgctccaaagctctgtccgcctgcaccgttacacttgataacaaatgtgtcttcatccagcgtatcgtcatatttctttgtaatctcagaaccaaatattgttccgagagatctgtttgtatttgttacctcaatctcaatcgcgcgcttttgtccgctctcaagtgcgctcttaagctgtgtcatgatctcagtcatatcctttgtctttgaaagctcaaagtcatatacctgcttaggatcgaatataacactctgctttttgccgtcaaacggattattaagtatgcagtcaaggtcaatctttgactgtctctcgcttagattatcacgcttctttaagagatctccacgtccaacgagctcatccactgtctttacgccaagctttgccatatactcacgaagctcttcagcgatgaaacgcatgaagttctcaacgtactccggctttcctgcaaagcgcttacgaagctcagggttttgtgtagcaattcctgccggacatgtatccaagttacatactctcatcattacgcagcccattgttacaagcggagctgtcgcaaaaccgaattcctcggctccaagacacgctgctattgccacatcacggccactcatcagcttaccgtctgtctcaattcttactttatttctaagaccattcataagaagagtctggtgtgtctctgcaagtccaagctcccatggaagtcccgcattgtggattgagctgctaggtgcggctcctgttcctccgtcgtagcctgagataagcactacctgtgctccggcctttgcaacgcctgccgcaacagttcctacaccggcctcagaaacgagcttgactgagattcttgcatctctgtttgcattctttaagtcgaatataagctgctccaaatcctcgatagaataaatatcgtggtgtggtggtggagagatgagtgcaacacccggtgttgaaagtcttgtctttgcaatccaaggataaaccttctttccaggtaagtgtccgccctcacccggcttagcgccctgtgccatcttaatctgaatctcctgtgcgcttgttaagtatctgcttgtgacaccaaaacgtcctgaagcaacctgcttgattgctgaacagcggttctttccgtcttttccgattgtgagacgatccttgtcctctccaccctcaccggtatttgattttccgtgcagatggttcatggcaattgcaagtgtctcatgtgcttccttggaaatagatccgtatgacatagcacctgtcttgaaacgtgtcacaatcgagtcaacgctctcaacctcctcgagcttgacacccttcttaggatagttgaaatccataagtccacggatatttgtatttttctcttcctcgtccacaagtgctgtgtactgcttgaacagattgtagtcaccgcgctgtgtcgactgctggagaagatggattgtagccgggttgtacagatggtcatcagctccgcttctcatcttgtgtctgcccttgctgtcaagtgtaacatctgtctcaagtccgagcggatcgtaggccgcagagtgaagctcattcacatcgttctcgatatcctgtaatgtaattccaccgatacggcttactgtatttgtgaaatacttatcaataacactcttgtcaataccgatcgcctcaaaaatctttgagccctgatatgactggatggttgaaatacccatctttgctgcaatttttacgatacctgtgatgattgcatggttgtaatcatcgattgctgcataataatctttgtcaagcatatgctcgtcaacaagctgcttaactgtatcctgtgccagataaggattgattgcacttgcaccaaagccaagcagtgtagcaaaatgatgaacctctctcggctctcctgactcaagaatgagcgaaagcgatgttctcttttttgtctttacaagatactgctgcaatgcagcaactgcaagcagtgaaggaattgcaacgtggttctcatcaacacccctgtctgagaggataataatgttggctccgtccctgtatgcacggtcagcctctatataaagtctgtctacagctttctcaagacttgtgttcttgtaatatataataggtaaaacctctaccttaaagccatctgcctttaaattcttaatcttcataaggtcggtgtttgtaaggattggattgttaatcttaagtacacggcagttttccggcttctcctcaagcacatttccggcctcaccgatatagagtgtggttgatgtgacaacctcctcacggattgaatcgataggcgggtttgttacctgtgcgaagcgctgcttaaagtagttgaataacggctccctgttaccggataaagctgcaagcggtgtatcagtacccattgctgctgtgccctcaacaccatttttagccatcggaaggattgaatccttgagtgactcatatgtgtaaccgaaggctctctgcattctctggcgctcttcctttgtatactcaggtactctctggttaggaatctttaaatccttaagatttaccatgtatctgtcaatccactcaccataaggctgcttgtctgcatatctctccttgagctcatcatcatctatgatttttcctgcaacagtatccacaaggagcatctttcccggacggagacgatcctttttcacaatctttgtagggtcaatctcaagtactccgacctcagatgaaaggataagataatcatcatctgtcacatagtaacgtgatggacgaagtccgtttctgtcaagcactgctccgactaaatcaccatctgagaatacgattgaagccggaccatcccatggctccatcattgtagcgtaatactggtagaaatccttcttcttctgagtcatgattgaattgtttgcccatggctcaggaatcattatcataacagcaagtggaagctccataccactcattaccaagaattcaagcgcattatcaagcattgctgagtcagatcctgccgcattgataaccggcaaaaccttctggaactcttttttaagctttggagactccatgttctcctcacgagctgacatcttgtcagagtttccaagaatagtgttaatctcaccattgtgcacgataaatctgtttggatgagatctctcccagcttgggtttgtatttgtagagaatcttgaatgtactgtggcgattgctgactcataatcaggatcctgtaaatccatgaagaactgtctgagctgctctacaaggaacattcccttatatactattgttctgcttgagaatgaaaccacatatgtattgtcgtttgactgctcgaaaacacgtcttgcaacatacagctttctgtcaaactcaagtcctctctcaacatcctcaggtctttttacaaagcactgcatgatgcatggcatacagtctctggcttttttagaaagcttatcaggctctgtaggcacttctctccatccgagaaattcaaggccttccttctccacgataacttcaagcatcttctttgcctgaatagtcttgaactcatcattaggaaagaaaaacattcccacaccgtaatctctttcgtctccaagatctattccaagtggctttgtaaccttcttaaaaaacttatgagaaatctgaagcaggatgccgacaccgtctcccgtcttaccatcagcgtcttttccggctctgtgctttaagttctcaacaatctttaaagcattctcgactgtctcatgtgttttgatacctttgatatttactactgcaccaattccacagttatcatgctcatagcgtggatcatataatcccttagctgtggctgtgctttcattccattgtttactcataggttcttcctttcctagtgtaaatttgttaacggataacttattaagaagtgaatcatttcctgtttatgattttacaacgatgaaagctcaatgtaaatagtttttttctcgctattgtctgattatttgataacttaatattataaagttatttttctgactatagtcgtatttttatcttttttataagggcatacgcacaattcactttttaaaattccaaaacttttttcaataactcatgttaaaaaatgtccttataacaaattgtgtctgaattgtgtatactttacagtaacttttcttggctgatatcataaaaaaatcagctatacttttattgtatagctgattaccataacaaccagtaactattctaaattgcacctcccatattcataaagctgcacgatactcgtattttgtctgcactccgtttcggtccatgctaaacagttccttctgtgtgcttcgcataataataaaatatcacagcaccaacaccaaggcacatgacagataccacccatgccattacactgccatcaacagtacacttcaaaataccggtctctgtccttatgactgcaaacgcatttgcggtgatatgcccgatcatagccgcatacacatgccctgacttatacataaaagctgcaagcaccaggccaagtaaaaaagcataaacaaactgcactatattaaaatgaatgagtccaaacaaaagcgccgacaaaaataccgcctgtggcacattcattattttgcgcatatttccaaatacaatgcctctgaaaacaagctcctccataatcggagaaagaattgccgagccaatcagctcaattacaagagtgcttgcataaaagctctcattcgccctggcatatccttctgagagcccgataagcggtgacatggtgatgatattattgagcgcaaatgaaatgaaaagtgtaatcacaatcacccaaatcacatttataaaaagtgccctgtctatctttggttttttaacaaacatctgttgtgtcggcttatagcttgcaaaatacataaatggtattgtaattgcagcagatattatctgcgctatcatgtatgtcgaagctgtgtgtccgataaacgcaaaaataaagtacattgcgctcagaaaaacaatgtagtaaagcacaatcgggacaattatctcccacactatcgctcttaattttaaattcttattcatgaaatcccattcctatctactgtttataacctcaggtctcaatgcattgcattttcataaaagctaatcgaaaagccttgaaagtacatcaggaagctgccttatatcatctatcacagcttttgcaccggcactcaccatctcgttaacatctccaaagccaaagcttaccgctatgcttggcacatcgacacggtttgccccttcaatgtcaaacatagtatctccgattaaacacatctcatcccttggaatgtctgaccaccggcgcatcacctcgttaagcacctcttcctttgtatctatcctgccgtcaaacgtagctccgaccacctcatcaaacatatccagtattccaaaatgctccaaaatacgctcacacgatttttccggcttcgatgatgcaagtcctatcctatatccggctgctttaagcgcctctatgcattcctttactcccggaaaaagcgaacattcaaatatacctattttgttatagcgctctctgtacttttcgaccgcttcaagtgctctctccttagtaaatccgtaatgctccataaatgtgattatgagcggcggtcctataaagaaaaacagactgtttctgtccggctcatctatgccaaagtgtgaaagtgcatattgggctgactttgtgatgccctctgatgagtcaatcagcgttccgtccaaatcaaataatattgctttcatttgttatctccattgttttaaatttattgtacttttaattaaaatgctaggtcagtatctcatttaacactcgtccgacagcatcggcaaactcgttgatactctttatcttcacgagacttctgccgaatatctttgttgcaatctcactgtcatgcgcacttcccatgaagatgccaattacgtctattccatggtttttaagcctctgcacctcatttacggtgtccttaacagcaagagcatcagtgtactccctgtccttataaaaggctccctcccctgctatctgatcatcctgaggacttgcatccgaaaacatgaaaagtaacttctttggctttggacttagctccatcagatgtgatgccgcgcgcagagcaaggccatccctgttatttcctgccgcaacaaaatgaaacagctcatcctccacaccataatcatcatattccttaaaaatatgcatcaccgtgtagcctcttatgctgcagtatgagtaaatctgcaccggtatgccacaatttgtcaggctctttgatagtacatatgcctgtgctgctatcttctgctgcatctgttttctggaagaagacgcatccatcagtatgtcgacagaaaagcccggtgtctccacctcatcttttcgctcaaaaacacgcggattgtccaagtacagggccttccatactctcgcaggctttatacggccgtgtgttgaagcatccataaatgtctcatctgctgtctccaggtgcattctaaggctttctgtaagtctccttatactgttttgatacactgccatgtttttttcaaaatgctctttattcttgtcgtattgcatggctgtctcttttttaaatgcaagaatttccctgcgctctcttttgttgtcaatctcatcaggtacagtctgctttttctccgatgaaatacctctggtaaaaagcaagtgacagtttttgtgatttcctacacagagctttttctccagctcggcctgctgcctgtcagaatacatgctttttccaaaacaggctgtcacataccgcttcgcctctattggatctttctgcagtgcaaactgcaacagatatctctttgaatgctccatagacaaagctgctgtatccgaggccatatttttatcataaaagctattcgctctgacatactgtgtgctgacttttcctattgagtgaaatgctcctgctaccttctgtaaaaaatatatgccctgcggctttaccacctttatcggcttatacgagaaatacttccacagattttctctcgttttcactataatctcatccgttgtcatatcaggtgtaaaacaaaaagcatgcagtatctcttcatcctctttgcaaagacctgatggctttccaagtatccttctacaatgtgcatttctgattatatcaatcctcgaatactccctgtttttatttactcctgcaaggctctttttcgcgtactcaagccttaaatcatataaggcaggcctcgtttgtctttccttttcatacagggcattttccaaacctatccataaaagcccctcataaagcatggcgtttttccctgtcagctgattgaataaggcatctatcttgtcatgctcataccacttgtattcaagcccaataatcagattcagataaatatcagcggatccatcaggtgcaaatgccagaaaaagcggctctatgtcatagtcacaggccgccatccatatgaagtttcttgctctttttgcttcctttatatcctgttcttccatatgttccattccttcatatgtcacaagctcatatcaacaaaatagctgctctccgctcatcttccttgagattcttgcacggattgtatcacggataagagtctgttcatactcatcaaagctcttgtttgttatccccatatccagggctgtatatatattcaagcccttttccatcataccaattgaaccgatgagaccacgcagatcaagtgcctttgatgatatttcgccatttttgcacttggtatgcagttcaagaaatacctccgcaagctcattcgctcccgcttcacgtattgcaggataatgctcctttataagcttcacaaggctctcttttgaaatcataggcatccggattaccgcaaaacgtgatacaagagcctcattcagctcctttgtgcctgcatagccgtaattcatcgtggcaataaatcttgttgccggatgaagcgacagtctgtcatagcccggcacatctattgtacgtctgaaatcaagtgtggcatgaagcactgccatagcctcactttttgccatatttatctcgtcaagcaccgcaaagccgcctgtttttgcggctgtatacacaggtcccggcctgaatgttacttctccggcgcgaaaagtatcggttccgataagtgatgctgcatccatatttacgtgaaatgacacatcccagcgtggtctgttaaatacacctgccagattttctgcgaaaagattctttcctgtggccttttctcctactaaaagcagattttctccacacaaaacagctgttatagcctgttcccacacatcgcttccgtaataaaactgtgtaggcacggggattcttgactcatactcattgtccaccggatactgcgaacgaaacttttcaatttccttaatcagattttctgaaatgccaagctctcttaatttgtccaacaagctcatcgcttcctttcatatcagatattttaactgttccaggccatacatactcaaaaccgtacacagtttatgctttacgttatattgtcatgcgatatattatttcttcacgcccttagtgtcacggtttgcaatgtgcagcctgtgaagcgccacctgcttaccctttacctcgacctctttttcctcctggtcattaagcagataaatatcagtaagctcatcctctctgtcaagcctcattcccctgacacctactgctgcctttttcttttcaggaatagtgccacagtcgattcgaaggaacatctccttctttgaacgcattaccattgtagcattctctgaaagcatgtcaacaaataacagctcatcatcatccatgagctttgtagcctgcgaggtccttcgtgtcaccacaaactcggcaccatccactagctttatcatggctgacttcgttccaaatataagcttgtgcttttcaacatccataagaggtgctataaatactatatcctccttactgctgtcatagttgcttacattgtcaataggtgtgcccttgtcacggaatttgccgtaaggcaggtctaacaccttgacaagatgcatgtttccgttgtttgtgaaaatgcacagcttatctatatttttgaccttcaatatcagcttgttctctgcgtcggctgtctctttgtttctatcataggttgaagtatctactgtcttcacatagccgaagcggtccataagcagcactacatccgatacctcaagctctttttttaccacaacagcttcctcgagattgtcaagctccgtgcgtctgtcccttgcatactccttgcggaacgctttaagctccttcataatgacctttgccatggatgagcgatgctctaaaatatcgctgtactctgcaatctttgccctggtctcctcgtgctccttaatcagagcctcaatttcgagtccaatcagcttgtacagacgcatttcaaggatagcagctgcctgacgctcagtaaaacaaagctgggctgccatggcttctgaagcctttgacttgaatttaataccctctgtctctccgtttatgagacatgcctttgccattttctggtcacggcttcctcttaatatttcaataatcagatctatcacgttacaggcctttatgagtccctgctgtatttcttctttctcctgctcctttgcaagaagtgtcttatactttctttttgcaatctcatactggaaattgacatgatgccttatgatgggtacaagaccaagcgtctcaggtcttccatttgcgacggccagcatatttacaccgtaagtgtcctccagctttgtctttttatacaaaaggttcttaagtgcctcaacatcagcaccttttttaagctctaagacaattcttattccctctttcgatgactggttggttatatccacaatatccgttgtcgcttttgactcgacaagtgaatagacatcatttaagaattttcctatattggcaccaatcattgtgtatggaatttccgtaatgacaagcttgtcctttcctgccttacccttctctatttcgattcttccacggatttttatctttccctgtcctgtctcatatattgctgcaagatcatcctgatttgcaacaatgcctcctgtcggaaaatcaggcccctttatatactgcatcatctcggctgtggtaatatcaggatttttcatataagcaatcacaccgtccaccacctcgccaaaattgtgtggcggaatgcttgtagccatgccgactgctataccctcagctccatttatcaaaaggttcggcaccttgaccggaagcacctctggctctttttctgtctcgtcgtagtttggaatgaaatcaaccacatttttgtctagatcagcaagatatgcttcctgtgtgattttttgaagtcttgcctctgtataacgcatggcagcggctccgtctccttcgattgaaccaaaattaccgtgtccatcgataagcggcatgccctttttgaaatcctgtgccaaaacaaccatcgcatcatagattgatgaatcgccgtgcggatgatatttacccattgtatcaccgactatacgcgcactctttctatatggcttgtcgtacctgatgcccagctcatgcatatcataaagtgtacgcctttgtacaggcttaagcccatcgcgtacatccggcagggctcttgctataatgacactcatcgcatagtcaatatatgatttctgcatcagctccgaatattcggtctgaattatattgttgtctacattgttatctatatttctatccatgtctttctccgattataaatactgcttaactattcagaaccactgagaacccaaagcagaaacgtcatgcttacacatccagctccgcgtcatgcgcatgctcgtatatgaactcttttctcggtggcacatcactacccataagcagtgatgtcacatcatttgccaggcgcccatcctctatttcaatacgctttagcatccttgttgcgggatttagtgtggtatcccagagctgatccgcatccatctctccaagacccttatatctttgcaacgtaaacttgcctgtatgtgtctttctgtacttgtcaagctccgcatcgtcatacaaatatttttcctcgccctttgacggaatagccttgtaaagcggaggcatggcaacatatacatgtccctctaaaataagctcaggcataaacctgaagaacagagtcaaaagcagtgtggagatatgagctccgtccacatcggcatcggccataatgatgattttgtcatagcgaagctttgttatatcaaaatcatttccatacccttccgaaaatccgcagccaaacgcatttatcattgtctttatttcagcgtttgccagtaccttatcaatacttgccttttcaacattcaaaatcttgcctcgaatcggcatgattgcctgaaacatacggtttcttgccatctttgccgagcctccggccgaatctccctcgactatgaaaatctcgcacttagaagcatccctgctctcacagtttgcaagctttccgtttgaatcaaatgaaaacttctgctttgtgagcagattggtctttgccttctcctcagcttttctaatctttgcggccttctcagcacatgatattaccgtctttaagacctcaagattcttgtcaaaataaagcggtacctcatcatttgtcaccttggcagttgcacggtttgcatcctgattgtcaagctttgtctttgtctgaccctcgaatctagggtcaggatgctttactgacactacagcagtcatgccatttctgacatctgctccattgaaattcgcatccttgtcctttaatataccaagctctctggcatatgaattgataatacctgtaaacgcagtcttaaagcctgtgatatgcgctccaccctcagaattgtatatattgttgcaaaaacctagaatattctcatgaaactcgcttgtatactgaaaagccacctcaacctttatattctcactctctcctgtaaagtaaatgacatcatgcaacttttcaatatttttattcaaatcctttacaaaaccgataataccctcaggctcatgatactcaatatgctctgtctcatcgcctcgtttgtcctcgtatatgattgtaagcttcggattgagatacgcagtctccttaagtctgttctttacatcctcttccttgaatctagtcttctcaaaaatctccgggtcaggcaggaaattaatccttgttcctgtctttttggttttacctatagtaggaagcaggccattttcaagctccacaacaggaacacccttttcatatctgtcatggtggataaagccatctctgcttatctccacatccatatatgtggatagtgcatttacaaccgacgaaccaactccgtgcagacctccgctggtcttgtatacagaattgtcgaattttcctccggcgtgcagtgtagaaaatacaactcgtgccgcagaaacgccctttgcatgcatacctacaggtattccacgtccgttatcctccaccgtacacgaaccgtttttctcaagagttacccttatggtatcacaggcacctgccagatgctcatctacggagttgtccacaatctcatatatcagatggtttagtcccttggttgtgacacttcctatatacatacccggtctttttctgactgcctcaagtccttctaaaattgctatgctcttctcatcgtatgtttgcttcttggccatacttgtctcctacttctttaaattgcgtaataattatattatctgccttgcctgctatccttgatatgtgctaacaccatcgtagctattttgaatatcatagcatcatcaaaggttcttatatcaagccctatcgccttctcaatacgctcaagtctgtaaacaagcgtatttctatgcacataaagctgtcttgcagtctctgaaatgttcagattgttctcgaagaacttggagattgtagacattgcctcctcatcatcaagtatctgtggcacctcgtcaccaaaaacctcacggataaacatctcacacaggctcattggaagctgataaataagtcttcctatgcccagcctgtcatatgccataatttccttttccacataaaacagcctgccaacctcaagcgccatttttgcctcctgataagactctgcaagctttggaagaacatccgtcggattgccatagcccacccgtaccttaatcatagcctctgcaagcagattgtcaaccagacttcctgcaatagatgaaagcttttcctgaagcttagccggatctatgtcctcaacatcctttaccagcactacattatgttcatccatcgccaccacaaaatcaccgcttctgatatcagccagattctttacaagctcaacagctatctcattgcagttctttccggtatctataacatatactactcgttttctgttttctatatgtaatttcttggcacggtttattatatcagaaccaagcatattgccaagaagaatattctgaataaaattatttctgtcatatcgctctgactcaccaagcacaagtgtacgaagctgacaaactgccatcctgcctattacaagattctcactcgtatactgacagaacattacaagcacatactcaagctctgaatcaatttcaaccgcaaatgctattgcatcatttttttccctaacatcctcttcggatactataaactccttcacaaaaatgtcgctatgttccggctcttccaccgtacctgtcagatgctttcccttggctgagtataaaatcgcatcaaacgaagtaatattttttatttcctcaagtgattttttcagtttctgattcgtaatcatattcctatcctctcattactgttctgacgcagacaagtaaaaagtctctacaagtcataagctgtaaccttgctataatttaacaccgtaacttaacttttcagaacctcacatacattcgcaaaagaaaaccgggtgtaaattatacacccggtctgtcaatttacaactatttaattttaacgaactagttggtaattgtcaattcagtttctttatcaaatacatgaatcttgtgtggatcaaatgcaagctcaatgtgatcaccgtaacgagctgttgtatctgaatcaactcttgctgacatatttgcgcctgcaactgtgaagtataataatacctctgcaccaagtaactcatatcctgtaacatctgaatcaatcttgcatgtagcaaatttattaagatgctctgctgaatcgtagatatcctcaggtctgataccgaatactacgttctttcctgcataaccgccatcgataagcttcttagcctttgcctctggaagctcaacctggtatttatcgaatttaaggaatacctttgctccctcaacaacacactgagcatctacaaagttcatctgtggtgatccaatgaatcctgcaacgaacaggttgtttggctgattgtaaagcttctgtgggctgtctacctgcatgataacaccatctttaagaacaacgattcttgttccaagtgtcatagcctctgtctgatcatgtgtaacgtagatgattgttgcacctaatctgttatgtaatgaagaaatctcagatctcatctgtacacgaagctttgcatcaaggtttgataaaggctcatccataaggaataccttaggattacgaacgattgcacgacccatggcaactcgctgtctctgtccacctgaaagagcctttggcttacggtctaataatttctcaaggtcaaggattcttgctgcctcctcaacttttgccttaatctcatcctttggaacttttctaagcttaagtccaaatgccatgttgtcaaatactgtcatatgtgggtaaagagcgtagttctggaataccattgcgatatcacgatcctttggctctacgtcattcataacctttccgtcgatgataagctctcctgaagaaatctcctcaagacctgcgatcatacgaagtgttgttgattttccacatcctgaaggtcctacgaagatgatgaactctttatcttctacttcaaggttgaaatccttaactgcctcaaatccgtttggataaactttgcaaacgttctttaatgataaacttgccattttaaaaatacctcctaagtattatgtacatatatgtaactgttcagtgccttgactgtctgttaccttgtttctttgtatctttataatacaaaacatatcgtcaattggctatagtcaatccgccaaataatttaacgtgttgttgtcattatgacgaaacacagtctgatatcgaaacaattacaaggtaattactgcaataaacgtactaattacagcttagaatatccaaagccattgaccatagcctcaatcggcagccccttcttgcagaatggacactctgtaacaggatatgtctggtagtttaccacatcatcgtcatcaaacagcttatcaatctttactccattgacctcatcgatggttgagaatatggacgcaatacatgtgaccataccgccataatagttgatacactccatcgctcttctgatcgtctcacctgtcgtggtagttgccagaagaagtacaacatgcttgccatctatagcgcccttattgttatccctgaaaagcatctgtccgttgttaatctcaggcgatacaacgtaaattgtctcgtgcttattcacagacataagtccgtttcgctcaatctcctggcttaagaatgcaccaatcatttctgttccatccatacatactattgtatctatatatgaatgatgcggtaccttggtgtaaagagcctttgcagcttcctttgcctcggacacacgggtcttgatgcttgtcacatctacataataattaatatgcgaatgacttgtagcgaaatgtcccggtatagcgtgtaagtttaagcctgcactctcctttgatttaaattttacaatacgattttccatgataagtccccctttttaagtaaagattagttttaattgtaactcatttgtgattaattagctcctgtagaaccgaatccaccggcaccacgcttcgtatcagaaagctctgacacctcattaaactcaacagccagatatggcatgaccacaagctgcgctatgcgatctccgggattaatagtgcgtgcctgcgttccatcattgtgaagagccacaatatactctcccctgtaatcactgtcacacacacccacgcagtttgccgggcgaagtgcctgctttgcagctaagccacttctggcaaaaactgccccaaaatatccgtcaggaatctctatcgaaagccccgtgcctatctttgctgtctcgtgtggctcaatgacaagatccttagtaatgtcggcatataaatcatagcctgctgcatattcacttccccttgtagggattttggctgtggttgtcaatttttttatatttattttcattttataatttcccctgatgtaattttatatatgaccgtctatagccatttattacccaacctattaactaattatttccactccagacttgagtgctcaatcttcctgtcacgaagcataagctctgagacagcctcctttgccggcttatcctcaaaaagcactctgtttacttcctcgataatcggcatccttacatcatatttttctgcaagggcaagtgcagcctttgctgaatagatgccctctacaaccatcttgacttcttttgttgcttcatccattgtgtagccctgacctatgagcattccggcctttctattacggctgtgacgactctcacatgtaacaataaggtctccgatacctgtcagtccaaaaagtgtctccgcctttgctcccatctcaatcgcaagcacagatatttctgcaattcctctggtaataagcgctgcctttgtattatctccatagccaagtccgtctgccatgcctgctgcaagtgctatgacattcttgagggagcctccaagctccattccaagcacatcaggactagtatacacacgaaatacttcattcataaaaagatcctgtactatctcagcggtcttctgtgtccttgctcctgcaacaacagtcgtaggaagcagctgtccgacctcctctgcatgtgaaggtccacacattacagccacatcagcgcaaggtatctcactctctaccacatcagatattgtcataagagtgttttcttcaattccctttgccacacagacaattatctgtccttccttcacaaacggagccatttttactgctgtgcttctggtgaatacagaaggtaccgcaagtacaagtatatcgttatttttgattgtttcctctatatctgttgtaaaggtaatgctatccggaagctttactccaggaagcttatcaatatgctcatgcttttctttaagcatctcaatctcgctctccacgattgaccatatttcaacagaatgtccgttatttgcaagcaccagggataatgctgtaccccagcttcctgcacctataatacctactctactcattttctatgcctcgtattttatataattattataatcaaaaactattatttactttgccttctgaccaaatttattttcagttccgcttaaaagtctcttgatattggctctgtgccgccagatagccatcgccgtaaaacaggcagcaagtatatcaaactcgaccgcataattgccacttactccaagcagccccatatggttaaacacaattgcctgaatcagaaacgatataacaaccagtatagaaccaagcgagacatatcttgttatggctacagcaagaataaacaataccaaacatatcggagccgcaatcggacatacagcaagtatcacacctgatgtacatgctattccctttcctcccttgaaattgagaaagaacggaaaattgtgtccaagcaccgctccaaagcctgcatacagctctatgcatttaacagcctgtggatatgtatttctatatatgaaataaaatatcaaaaccgctatgattgccttgaacaaatcaccaaagaaggtaactgcaccggccttccatccaagtgtccgaagcgtattggtggtgcctgaattaccgcttccatgctctcttacatctattccatgtgccttaccataaaaatatccggtctgaaaggttccaaagaaataccctacgaccaatgctaaaatcctagccagtatcattttactcattttcctttcgttctcttgtaataaacttaagtgcagttcccctgaaaccaaatgtatccctgattctgttctcgagatatctggtatatgagaaatgcataagattcttgtcgtttacaaagattacaaaggtaggcggcttaaccgaaacctgagtcacatagtatatcttaagtctcttgcccttgtctgtaggcggctgctgcatggcaactgcctccgtaacgatctcatttagcactcctgttgcaacacgcattgagttattttctataacaacatcgatgagctcaaatatcttgttgagtctctgacctgattttgccgaaataaacagtatctccgcatatggtataaaacttaatatctgtcggattttctctgtgtgctgctttacagtattattatccttttcaatggcatcccatttattgacagcaatgataattcccttgcctctttcgtgtgcaatacccgcaattttagcatcctgctcagtaactccctctgtagcatctatcactacaatgacaacatcagctctctcaactgcggaaactgcacgtataatactgtatcgctctatatcctcttttatcttattcttgcgcctgagaccggctgtatcgataaatatatactccttaccatcatattttatggctgtatcgatagcatctcttgtggtgcctgctatatctgacactattaccctgtcctcacgggcaagcttgttgataagcgatgacttacctacattaggcttacctactatagcaactctcggtctgtcatcctcatcgtcctgcttagatgaatccggaaaatgctttacaacctcatcaagcatatctccgagtcccagcattgaagctgcagatataggatgtggatcaccaattcctaagttataaaactcatacacatcagtcatgtacttttcaaagctatccaccttattgacaaccaatacaaccggcttgtgtgaacgacgaagcatatccgccacctttgaatctgaatcaacaagcccctgcttcacatctgtgataaaaataataacatctgctgtgtcgatggcaatctgtgcctgctctctcatctgcgacagtatcacatctcctgattccggctcaataccacctgtatcaatcatggtaaaattgtaatcaagccatgatacatccgcatatattctgtctcttgtgacacccggagtgtcctttactatagatatcctctctcctgcaagcgcattgaagagagttgattttccaacatttggacggcctacgatggccactactggtctgctcatatactctcctgttctaaattcatattagattatagactaattgtaactattcagaataacgataaaataataaacaaaacatctataacagagtaattatatcacaataccatttacagagacaactattcatatgtcaaaagtggttcttttgatgaaattaatccattttctttaagaacagctatcagattagtacagttttcaccaaacctaatgttgaccgaatacgtttcaataccatcggaacgggcatccccaaaatcagaatactcctttgttacccccagtatatccaacagctcctcataccatgtgaagccatcgacattccagctttttccaatcctgttgccctttggaactgtaaaattcagcataagattgtacatatagctggtatccttatccactccgtcaagcattctctgcaaattatattcctgcatcacaccggcctcaacatccttctttacagcatcaaaaatatccgcagcaacttttccgttaaagcgctcattcagcacatctacatatttatcattatactgctctgccgagccattgataaaggtaatatctgtcgtatcacactgcattatggcattaataatattctgtggtttattttcctccgccataatcgccttacactgcttatgtggattaaaatcatccgttatatgatatacacggttgaccttttctccattttttaatgtatatgagattgtaatatacccggaatcatcatatctctttttaaaataatcctttttctgcgccataagtatcttttgagtctctaaaatcttttcaacatcctttccctccagattgatatcaaaatctatggctatacaggcagaatcaatatccgcaagcttcggtatataattttcctgcacatttccgtaaactgttatacctccaaatacaactacaacaaaagcaccaaaagcaatgatttccttaaatagtgctttagaaaaaattttaaaattcttccttataatcatctctaaaagtaagaaggctatgattccaagcaccactgccagcatcataattgcaggaacaccaatgctgattctaagtccaagcaaaagcgacgctgcaacaatagataaaatcaatcctcccaaactgccaagcccccatctgaaaaccggcttaagctttggaatggcaataaaacttcctgcattttccaaatctctatgcttataaatcttataagaaataaagtatataactgcagccgcgataacatagactacgatagtatttgtgcctctgaaagtatatttaatacagtaataatcatctcctgctttcttcatggtcggatgaaagcctatccgattgagaagctgtaacatgggtgcaaaccacgtaacacttattttctttacaaattccatatatggaagcccgtacgatacatatgtgagcacattggcaatggcaataaccgctcctccatacagcagattgacaaccgcatacatcactgctacagaaacaagctgccctgtaatcattgcgcacagacacaccaggctgtacataaaaaaagatattcccattgtagcaagcagattgattccaatatgtaccaccttcgtattgccatatgatatacatataacaaacgacataatgtacttaactatctgcggaatccacataaacagcagacctgtcaacacattagtcgaaaaaagctgacgtcttgtcacaggcatagcgtgaatcatattacatgctctcgaattatacaggtaactgaacattgccatgcctgtaaccaatgccataacaaaaataaatatcatatctgcctccatgctgatagccggggacattatatcaagcatatacttatgccaatttgtgccataaataaattctgcactcttaaatctgctccacatggaaaacgggccgttaagtaatagcactattgtatacagtgtccagattggccagtaaagctttacattcttttgcagcattgttttattaataaatgatgtctttgacttcatagtcctctcctcccatctcatagataaatatttcctccagagtaagaggcagtacatccactacctgcggactgtccttgccatctgtaatagcctttacaacagcctcaggctctccacgcacaataactgtgtatactcttcctatatttgacatatgaagtactttaaaatcctgcggtatcttaggcatgccatatggacatgcaatctgaatctttgaaatattaccctgcagctctgtaagagagcgctctatcataatctttcccttattgagaatacctacatgatcacacacatcctccagctcgcgcaggttatgagacgatacaaccactgtagtattatttgcagccacatcatcaagcatgatagaccatatctgtcttctcataacaggatcaagcccatcaacaggctcatcaagtacaataagctttggtttacagcacagtgcaagccagaaggcaacctgcttctgcatcccctttgaaagctttctgatatttcttttaacatctatagatgggaaaaactcctgcatcctgtaaaactgcttctcatcaaaatttggatacattcccttataataatgcatcatattaattgtatcagattgcaaaaaataaaacatatcatccggaatgtaagccatatgtcctttaatccttgcattttcatatacaggctcaccttcaataaacacttcccctgcatcctgtctcattactcctgtaatatgcctgataagtgtagatttgccggctccgtttgggcctacaagcccatagacagctcctttttccacgttcatattcacaccatcaagtgccttaaaatcgtcaaattttttcactaaattatttatctgtatcatcattaccctctgtcacaacatcttctgtctgcatatcttgtgttacaaatctgactaagtcatcttccatgctcagctgctctttcgcatcatccattcttgttctcaattcctcaacaggtgtttcaagcacaaataactctgtcaccacctggtcaaagagtattttcaaactccttgtcagactctgcctggctgtcttagcatcagcaacaaaggttcctttaccacttttagtataaagatagccttcctcctcaagttccttgtatgcttttgcgatagtgttaggattgattgcatacttgcaggcaagcacacgtacagacggtagcttttcgtcctgcttaataacattcataacaatcattcgtctgatgccttccttaatttgttcataaataggctttgaatctcgataatttaactgcatatcgttctcccctgttcatatacgccagtaccgctgtgccttttatattaactcaaagaaccaaaaaaactgtcttgcagcatcagttcccgcacagtgtactatccaacgtgatacacctattttaacatatatagctttaggcatttcttattatttccttaatagattgtgcgaaaattacttaagaaacataaaagctccaagatttccacgctttccatgacttgctctatgtgaaaataaaagagatggattacaacaagtgcatatattgcttatggcaatattgtcttcctgcactcctgcctccacaagcactctcctgttacattcccaaagattgagctgatatttgccgtctcccttatatagcagaatatcactcgcatgaggatcatctgttgtcgcaaactcatccacaaaacactctgcaacatcctgacttatctcatagcagtcctgacatattgaaggacctatcgctgctataacatcatgtgcctcggtaccaaactccctgttcatagcaataagtgtctgttttcccatgcgatttacagtacctctccagcccgaatggctaagccctattgccctatgtaccggatcaacaaaataaagcggtacacaatcagcataaaatgtggcaagcacaacatttggctcattcgtgataagtccgtccacatctgtatatggtctctttcttgtcaccccgatgccacactgcttttttccaactctcaaaacattggtagtatgtgtctggtctgtcgtaacaatctgtcctgcctctgctccgattgcctccgccactcttttatagttttctaagaccttttcctcgtcatctccacgtgtaaagcttagatttaagctttcaaacatcccttcactgagtccaccaagacgtgttgtaaagcaatgctctatcatagaaagctcatttagcttcctaaaatgtaacaaagggacaacacttccgcttgaaaggacatgcttttttaatcccagaacatctttatcattctttgtaacaaaatcatttatagtaatttcatcaacatttttgtgtatgttttcagcctgcatattcttatccttctttatattcttatccttctttatattcttatcaatgtctgtcttcatatttatatatgcaactatatattaccgataactattgctttttataatttcctgttccttgtctgttttcacgaaatagtctggtcaaacgtttataaattaacggttccgtaatacctgtccgtaactgccaagccaatagttattgactgccctcaaatgcattcttcaacacagtaacctcgtcatcgtccactgctatcacatcaaatctgcatggcgtccactcattcagaccatgtgtcataagataataccttgcaactgatatgatttttttctgtttgctataaccaactgcttcaagagccctgccgcagccattatccctacggtatttcacctcacaaaaacatattgtatctccatcctttgctattatatctatctctccaaagcggtttctgtaattgcagacaagtacactatatcccatatttattaactgctcagctgcaagctgctcatatatacttccaacacttcttttattcataactgcctcacatatcatataacctacacactatctttagtcaatttttgccttaagcttatcttgccaaaatctgctcaccatttgtcactgaattgttgtattgacttaccaaatttgatatctgcatagcatcaccctgatatagtatcgctatgtttaagtatacatatataaattgtatcatttattggtatttctgtcactatattactgttcacacaccacagtgtaaccggcaacaattgatttctttcaaaaatcaggtgaattccaccatattcttcctataccactttggacaaagattgcgctgacattgtggattgaaccgctcccttatatcagtgtgctcaaaatacaccttccataactgctcaaaactgtctgtcttcaccggcacacttctctcaagctgtttaaattcactttcattgatataaaagcactccttaagcctcgggtggaccactgcataccttcttctatcatcacagattacaaaattttccccgggatacctgtccacaaaatgccacataacaaccggtatcatatcgcattttggttcaaagtgcgccagcagatagtttccattatcactaaaacgaataaaccctcttatcttatcagcctctttatttacctttcttgaaagctcaaatacctccataacatatttatcggtcatatgctccataatcctttgtcccaccttaaatgctctgacaagaaatccaagcactattgttgctctattatcagaataatggcacaaagcatcaaatacagtctcatatatcttaaaaccaagcttcttttgaattgccaaaattgtcttttggacctttacctcatctgtttcaatatctatcatctttgaaaaaagtgtatagtttcctccaatgcctatctcaatagaaatattgtcccggtatactccgtgattttctttttgcatttgatttttgtatacaaaagcatcatatatagcggtaaaaatcccatttatattattatcacatctaagtattatattatccatgcatacttctccctgcagctttacaaaaatattgtctatccagatataaaatcaaatatactcatctgctcataagtacatgatttattatcagctaaaagcatagtatccggcctttcgttatatatgagatgccttgtaatatagctttcatcaagctttgtattgtacatcatacgaccatcacaggtgataaagtacagtgctcttttgagcacgacacccattttctttaaatctgtaaacgaaagctttgcatgctttctggcttttataatacgcctgacactgttagtgcctattcccgggaccctgagaagtgtataataatccgccgtcataatctcaaccggaaaacactccagatgacctacagcccactgacactttggatcaatataatcattaaagttctgattattctccgacaaaagctctcctgccttaaagccataaaatctcataagaaaatctgcctgataaagcctgtgctctctctttaacggtggcggctgcccgatacccggtaatgactcatccatattaacattcacaaaagccgagtaaaaaactctcttcatatcaaacctgttgtacattgcttctgctacagatataatctgaaaatcactctctccggttgctcccacaatcatctgtgtactctgccccgccggcacataatatctgtccggtcttttgatacttaagcctgtattattgatataatcaccagctccataagaaacgtccgttgtctcacagacaactcccggatcaagctgcactcccatgccccagcttttttctgcaagcttatcagccttcccgcaatctgtagcaaccctaaggcatctgtgatactctgataatcttgcagtactatcttttatttcggccatctgctcataatatgcctgctcatctatatacatacggtttttcatactgctattgccatgatacattcggctgtcctttataccattttgaataaatctcataggtgtaagaatgtttttacgcgccttattcggagcaactgccctaagcccttccgctgtgggcaactccagattaacactcatcctatcacaaagatatccaatcatctcaaggacctcagaggaggctcccggtatacccttgatgtgtatatacccattgaaatgatatttgtttctcaaaagaaaaagcgtggtatataaaagctgcatggtatgctcgggcgattctatgataccggagcttaagaaaagtccctctatataattgcgtctgtaaaactcaacagtaaggttacatacctcctcaggcgtaaatgtcactctttcaacatcattagtgcatctgttgatacagtatttgcaatcataaatacattcatttgtaaaaagtatcttgagaagcgatatacacctaccatcagctgtaaacgaatgacatattccactggcaaatgcactccccatatcatttccattacccgaacgggatgccccactggaagtgcatgcaacatcaaactttgccgcatcagacagaatcttaagtttttccataatatcagcactgattgacgttaacataaggcctccttatttttcgaacatctgtttgcattatacaacatatgttcgggtaaatcaagtgaaaatttttggaaaaatattgttatggttcataagcacaaaaaccatagatatcttaaatgcattaagatactatggtttttatttataataattatcgtaactattcagttgcaaaaaatatagtagcctttataaacagactttattccgtctaaaaaatattcttaagagctactgtatgacatgattttatcccaatttagtcttaaaaaactcgattatcctatcccacagttcatcctggaaaaactgcagatccgcatggtcagcgccttctaatgcaatcaaatctgcatcacatccattttcaataagcttgtcataaagctcttcactctgctcaaacggaactgtctgatcatttataccatgaataatcaaaaatggaggagcatcttttgtcaccttagataccggtgaactgttgtatgcttccttgatatttctcatagtattatatccgagtaaaagtgactccatagatgcagcgcattcctctgcatctttatacttaaatgtgctaaggttagtaggtggataccatggacatgctgcctgaatactgcttgactcttcaagatattctccaacatcacgagctttatcatgatccaatgccgccatacatgtcaaaaatcctccggctgattctcccatcgcaccaaaatgttccttgtcaattctgtatctatctgcatgtgccttcaaatacctgattgcagccttcacatcctctatctgcataggatagcaaccctcatttgatgtgcggtattccacactgcaaacaacaaacccctgatgagcaagcgtgctaagatatgatagatgtgctgacttatccatcctcatccatccaccaccgcatatccatactatacaaggataacgcttatcagacatatcctcaggatatattaaatccagttttaaatccctgcgacagtgatcataccaggaatccacctgcgcatatgtgatatcagacacctgcacatactgtggttttgttatattgatcataagcttttctttcattataaaatcctcctcacatttgtgatccttcttgaaatacaaattagtattattttattgaaaattatatatgtctttttaactatctttttatatcttctcaaatgtccgcaaagccttattttatcggctctacgggcaattctgtctcaaaaaaatttagaccttctcacagagtattggttcaaatgtggtcgccctaaagatatccttttcccaagttcctggtccggtggatatcttgatatagccagtgttaaccagttctttaagaaaagtgctaaactcgccggcattaaccgtcatgtttcctctcatgcgtgccgtcatagttttgccagccatctattcgaaagtggcacagatataaaatatatccagtcacttctgggacatgttgatcctcgctctacagatgtttaccttcatgtgagcaacaagacacttcttggggaaggaaaaaatctttcccattgtctttccaatgatttttcacatccagccctccaccaagaacaatcgcatggatatggggatgaaagttcatggtacttccccatgtatggaggatacagatatagccgatatcagtcccaagatatttactgtcagcagcaagttcactgagagtatctgaagccgcatgataaagagcagtgtataagaatttctggttgctgtagataatgggattgagttcttccggaactgtaaaaaccacatggaaataaggagcatctaagatatcctcccgccgtgcatctacccatttttcttttggaaactcctgacacataggacagcacctgtcacggcaggagttatagtggactgatatgcagccgcagtcctcgcatacacttacattcacaccaaaggcaccggttttgcaattcatgatgtgataagcggcctttcgctgagcgggagaaatactatgtgtggattcaaaagatggataaaaacgatgaaaaacatcctgaatcgtacaatccttactcatgattcaccaccttccgggttgtcgaacgggctgcggattccaagaagtgtcttgttgctcacatgaaggtaaacatctgtagagcgaggatcaacatgtcccagaagtgactggatatagcggtgattggaacagcggtgattggaacagcggtgattggaacagcggtaatcgcaacagcggtaatcgcaacagcggtaatcgcaacagcggtgattggaacaagactaacttttccaatggatgcttcaacacagaagaaccaaaaatcttcttattcaataaaccttcagattggacttatcgtgattggttaaattcagatgcaagatatctgttgaatcagattccaagaaatgttgttgattggatttggtcagatgatatgactgatgaagaaaaagaacagcatcctgaatatgaagttgttggtggttacttaaagattcttgatgaatcagaatgtggacagttatggtgggattcactttctgaaagatacaaaaacatcatcaaagcaatgccaaactttgacaaagaaatctttgaagatgtgacaggcatcaagatatgatttccctgtttccacatcagcaagaagcattgcaggaaacaaaggactttgacaacattgcagtttatcatgacatgggtcttgggaagacattcacagggtcagaaatgatgaaaagatttggatgcaaagtgaatctgattgtgtgtcagaaatcaaaggttcaggattgggtggaacacttcacagataactatcagatgcaggtgtttgaccttaccaataagaaacagcttggtgaatatcatggactgtcacaaggacaaagattcttcatagttggtgttatcaattatgaattggcttggagaagaaaagaattacttgacttatataatttcacattgatgcttgatgaatcatctttgatacagaatcagaaagcaaagcagacaaaattcatcctgaagatgaaacctgcacatgtgattcttctttcaggaacacctgttggtggtaaatatgaaaatctatggacacaagtccacctgctaggttggaagatttcagaagacctgtataacaggcaatatgtgaattggacaacaattgattcaggtggttttcaacacaagattgtggacagagaagacccatataaaaacattgataggttgaaatctaaaatgcgtgaacatggtgcaatattcaaaaagactgaagaatgttatgaattacctgaacaggtattcacacacatcagattgaaagcacctaaagagtattggaagtttcagaaggattgcattgtaacaatagaaggtcaggaattggttggtgatacatcattgacaaaattactttatagcagacagatatgcagtcaattcaatcaaaacaagttggatgcattcagggacttggttgaatccacacaggaaagattgattgtattctattcattcaatgatgaattatggaacatgaagaagatatgtcaggaacttgacagaccaatatcagaaatcaatggacacaccaaagacctgacatcctatgaacaggaatcaaatagtgtgaccttatgtcagtatcaatcagcatccaaaggactgaatcttcagaagtgcaatagaatcatttatttctcacttccattgtcatcagaagattttgaacagtccaagaaaaggattcacaggattggtcaggaaaagacatgtttctattatctgatgatttgcaggggaacagttgatgaacaaattctgcacacattagaagaaaggaaggattttacagatgaattgttcaaagaagatgaaaagaaaaattcataattttgtaatcaaagccttgactgcattgaatgcattttcgctgatttattggatatgttggattgactgcattatcagttggcaaccatatgtcatcatgttagtcaatttcacatggatatgtcttgtattgtatgcaaatggttgggtgactgacacaaaaccatattatgaaagattagaaaaggaaggtgaatattatgatgaaatgtaaagttgctatggatgataaaaatgaatgcacaaattgctgttatttctgtgataagaaagacacttgcaatgatgtgtgtcaggacattgcaaaagtgtgtgaagaacaggttgaagaaacagaccttcaggttattgaatcaacagttcctgatgtactgaaagcaatcacagacattacagttcagaaaaagaaattggaagaacaggaaaaagtgatgaagcagaagttgcttcaggcaatggaagaacatggtgtgaaatcatttgagaatgcaaaagtcaaattcatgtatgttgcaccaacaacaagaacatccattgattccaagaagctgaaagcagaccatcctgatattgctgaagcatattcaaagactttcaatgtcagtgcatcagtaagaattacagtgaagtaggtgaacacatggcatcagaaaagaattttgaaaacagaatcaagtctttcctgaaatcaaataactgctattttattaaatattggggcggtggtgaattcaccaaagcaggtgttcctgacatccttgcatgttgcaatggaagatttcttggaattgaagtcaaggcacagaatggaaaaccttcaccacttcagattcataatctgaagaagattgatgaagcaggtggatttggaattcttctatatcctgaccattttgaattgtttaagaacttcattgactgcttaaaggtggatgatgcaaacactgcatacaattatgacttattgaaaagaaggtggtcagatggataattttcatttttcaacagcagaatgttttgaaaattgtcctgcaagatttggtttcagatacagacagaacattgaagtgcttccaacagatgaccctgcaaatccactgattcttggaacagcaattcataggggcatggaaaaggatatggaaacagctattcaggaatataaagattcatatcctatcatcacagatgcacacatcaatgaaatcatcaaacttgaatattggattccaaaaatgaaagaacttcttcctgaaggatttcatgaagtcaatttcaagaatgatgtttatgaaggaacagcagacttgattgttccatgtaccaagcatgatgcaggtcttccacatggtcagtttgatttatatgatttcaagtattcaaacaacattgaccactatatggaatcaagacagttgcatgtatataaatatttctttgaaagaatcacaggaaagcacatcagaaaaatgtattttgtgtttgttccaaaggttcagattagacagaagaaaacagaaacgcttcaggacttcaggaacagaatctatgaagaacttgaagcaaaggaaattcaaatcaaagaagtggtttatgacccttccaaggttgcagatttttatgaaacgtgtatgaacattggtcttacagataagtgtgaaaagaatgaatcttatttgtgtgattggtgtgaatataaagactattgtcagaaaggattggactatatgattttaccaagtgcagaaagaagacaggttggaaagacaaccaaaagaaaattatggatttatggtggtgcattttcaggaaagacaacatttatggattcagcaccttcaccattgaatctgaatactgatggaaacattcagtttgttactatgcagtatttacctatcaaggacacaatggaaggaagacagaaaattcttgcatgggatgtcttcaaaaaagctattgatgaacttgaaaagacagcaggtcagaatgggtttaagaccatcattgttgacttgcttgaagatacttatgaatcatgcagattattcatgtatgacagattaggcatcacgcatgaatcagatgacagctttagagcatgggacaaggtaagaacagaattcttatcaaccatcagaagattgatgaaccttgactatgaaaacattgtgttgatttctcatgaagatacttcaaaagacatcacaaagaagtcaggggataaaatcacagcaatcaaaccaaacattgcagacaaggttgcaaataagattgcaggtatggttgacattgtggcaagggtagttgtggaagatgatgaaacaagaacattgaatttcaaatccaatgaagtaatctttggcggtggaagattaaagaacatcaaaaccacatcaattcctttggattgggatgaacttttgaaagtgtatgatgaagcaaatttttttgcaaaacctgctgaagaaattcaggaagatgcaaaagaaactgctgaagaaacaccaagaaagggaagaaaatcacgcacacagtcagaacctgttaaagaatcttctgaagaacctatgcaggatggaacaaccaacactgattcagaaacagttgtcttggatgctgatacttacttccatgatatcaagaatgataactatctgatgaaacatgcaggtgattctgttgatttggttgttgatggtgaaacagtcatggaagtaatcaccaaagaagaatttggtgaaggtattaagaagttgtcaggtgcaggtgaagaaaaacctgcaagaaaaagaagaacaagaaaggaaagataatcatgaagaaatttattgaagcattaaaagaagcaggaatttatgaccacattgttgaaacaattgtggatgtcagaaacagatatggtgcaaaggatgcaaccaaaggaatcacaatgattctgaaaacagaaatgattaaaaatcctaagttgcttgatgttttcatggatgatactgaagacttaggtttcaaaacagtttgtgcagaaatcatgaaatcagttgtggatgttgaaaaggttgatgcaatgaaagatgtcaatcctgatgaactgttcaagaaagcaacagaacatggtgacagtggattgaagaaatccaatgaagaagcacttgaagatgctgttgttggtagttttattgatttccttaacggaattgcaaatatgttaaatgattaagaaaggttaaaaaggtgaatgaaatgagtatttttgataaatgggataagaatgtggacacagaaggacttcagaaagatattgctgaagcagaagcaaatggtggtcagggtgactatcgtgaagtgcctgttggtacatatgaagttaagattgacaagatggaaatcaaggaatgtggttcagaaaaacatgcaggtgaaccaatgttcacagttcagttcagaatccttgaaggtgactttgaaaacagttgcttattcatgaatcagcttatcacagaaggatggcagattggacaggtcaataagttccttagaagtcttgatgtcaatgacacagtggagttcaaaacatatggtcagtacaatgacatgattatggacatgatggaatccattgatggaagtcttgaattccttcttgaatatggcaagaacaagaaaggctataacacattcaaaatcaaagaagtgtatgaagtataaagaaaggtaggtgaatctgatgctgttctttgactttgaagtgtttatcaaggattggcttgtggtcatccttgatatggacaatagaaaagaacatgtcatcatcaattcaccttctgaccttaaacaattctatcaggaacacaaaacagatatatgggttggattcaacaatcatcattatgatgattacatcctgaaaggaatcctttgtgacatgaatccaaaggaaatcaatgaccacattattatcaaagaaaaagcaggttggacattttcaaatctgttcaggtcaattccattactgtcatatgatgtgttccaagcaaagattgacaggggactgaagttctttgaagggtcacttggaaatatggtgaaggaatcatctattccatttgacattccaaggaagctgactgaagaagaacttcaggaaactgttaaatattgtagacatgatgtggaacagactgttgaagtattcatgcaaaggaaagcagactttgatgcaatcatgtcactaataaagatgttccctgaagttctatcaatcagggacattggactgacaaaggcacaaatcagtgcaaagattttggaatgtgaaaaggtcagaagaaatgatgaatttgacctgtttgtacttccttgcatacagataaagaaatatagaaaagcaattgatttttacatgtcaatggttgggaaaactaatcagaaagaagtgtattcagaatcattgaacatgattattgcaggattggaacacaacatcagttggggtggaatccatgcaggaaaagaaaaatatcagaatcttggacatggtaggcagatatggcatgttgatgttgcttccttctatccaagactaatgatattccataacctgcttacaagaaacagcaagaaacctgaaaagttcaaaatgatttataacagaagaattgaattaaaacatgcaggtaaaaagaaagaacaagcaccattgaagattgtcatcaatggaacttatggaatcagtaaagcaatcaattcattagcatatgacccaaggaatgcaaaccttatctgcttgaatggtcagttgatgctgattgacctgatagaacatttggaagtgattgatggatttgaattgattcagtcaaacacagatggtctgattgtcagtcttcctgatacagatgaagcatttgaacagatggatgatatttgttttgaatgggaaaagcgttgcaatatggaattggaatttgatgaaatcagttctatttgggaaaaggatgtcaacaattatgtgttcatatttagtaatggcaagatagaaagaaaaggtgcttatgtgaaagaactgtcaccacttgactatgaccttccaatcataaacaaagcattggttgatagattagtcaaaggaacaccaattgaagcaaccatcaatggatgtcaagacctgaaggaatttcagatggtcaagaagatatcatcaaagtatgactgtatcatgcatggtggacattgggaaaagcacaaagcaatcaatcctgcaacaggcagattgaaaacattcacaaggtttgttggtaataccaagaaactgaatgaaaaatgtgtcagggtctttgcatcagtaaatgaatctgatggtggactttggaaaattaaaaaagatggtagcaaagcaaaggttgaaggaacacctgaacactgcttcatcttcaatgatgaagtgaatggtgtcaaagttccaagacaactaaataagcagtggtatatagacacagcttatgacagattatcaggatttggaatttgtgaaggaagaaggtgaagactaatggattggaaaggaaacagcatggtcttcaaaggctattcaacaggcacaggaaagaaagcaaccatgaaggtcaaggatgcacagcttctttcatgggatgatgttcaagggaatcagtcatttggtgcaatcctgaatcaggactttattgatatttcatttgatactgatgaactgtcacagaagttttgggacatggcagaaaagaacaattggaattgtttgattcttgaaaatcctgaaaatggacacattcacagttattggaaggacacagaacacaggattgaaaagggtggaaaggataaaaaacttgcagttggattgattgcagatattcattcagggtcaacatacataccactaagagtcaatggtgttgatagattcccaccatcctttgaacctgatgacattgatgaagttcctgatgaattgattcctgtgaatacaaccatcaatcttgcagacttgcaggaaggggatggaaggaatgatgaattgttcaaatacatcctgattcttcagtcacagcttatgttggacagagaaccaataagaagggtgttagataacatcaatcattttatctttcaggatgcattatcagaagaagaaatggatgtcatcacaagggatgatgcatttgcaaaaccaattttctacaaaggaaaaacattcttgcacaatgcttttggtcagtacatgaagaatgaatatcacatcaaaaggattcagggacagcttcatgtgtatgatggtgggatttataaatcaggttacagattcattgaatccaagatggttgaattgattccaacactgaaagcaaatcacagagtggaaaccctgaagtatttggaaatcatcacacctgaagaaacacaggttgcagatgcaaatctgattgcattcaggaatggtctttatgacttagcaacagatgaacttcttccattcagtcctgaccatgttattacaaacatgattccttgggactataaccctgaagcatacagtgaattgtgtgataagacattgaacaaaatatcctgtcaggatgatgaaatcagagcgttacttgaagaatgtattggatattgcttcttcagacaaaatgaattatcaaaatcattcttcctgacaggttcagggtcaaatggtaaatcaacatttttggatatggtgaagaatgtgcttggaagaccaaactatgtatcacttgatatggatgaacttggtgaacgattcagcacaacaaccatgtttggaaaacttgcaaacattggtgatgatatcagtgatgaattcctgcaaggaaaggtcattgcacagttcaagaagattgtcagtggaaatgatatcaaagcagaaaacaaaggtcaggatgcatatttcttcaaaccaacagtcaagctgttattcagtgcaaatgagattccaagaatgagaaacaaaggatttgaagcaatcaaaagaagacttgttatcattccattcaatgctaaattcagcaaggatgatgatgactttgatgcaggaatcacttggaagctgaagaaacaggatgttgcagaatacttgataaaacttggtattgaaggattgaaaagagttctgacaaatcagggattcacagaatcacagaaggtcaaggatgaagttgacaactttgaaaaagacaacaatccaattcttctattcttggaagaagtggaagaagatgaaattctaaaccatgaaaccaaagaagtatttgcaaggtatgacacattttgcaatgaaaatggattcacaagaattgcaatgcagactttcactaaggaaattaagaaacaccttggatgtgataggaaggatgtcaggttgaatggtaagaaagcaataatttttattaagtagaaaggatgatggatgatggaattacatgaagaaacagatggtcagttatcatttgcagaagatgttgtcaatcatccatcccactattgtcaggatggtggaatggaatgtattgatgaaatgatagcaatctttgggaaaacagcagtcaagcacttttgcctgttgaatgtatggaagtacagaaaaagggcagtgttcaagaatggtgctgaagatatgaagaaagctgattggtacatgaagaagtatgtggaacttggtggaaaggcggtgaactgttgatgaattatcataacattacaaaagatgacatgaataatggtgatggtttgcgtgtagttctttgggtggcaggatgcagtcatcattgcaagggttgtcaaaatcctgtgacatggaatcctgatgatggtattgaatttgatatcagagcaaagaaggaaatcttcaaggaactgaaaaagaagcacattgcaggaattacattcagcggtggtgaccctttattttcaaccaacaaaggaacagttttctgtctgtgtcaggaaatcaaaaagaagtttccaactaagactatttggatttacacaggatatgattgggaaaccatcatgaataacaaatatatgaaagcagtgatgaaatatgttgatgttcttgtggatggtgaattcattgaagaattgaaagatgtcaattatccttgggcaggttctaccaatcaaagggtgattgatgttcagaaatcactgaaggaaggaaaggtgattctgcatgaaagtaattaagaaagatggaacacatgaaggttatgacttcatgaagataaagaatgcagtcacaaaatctgcaaaaagggtcatgattgaccttgatgatgaagcatttgacagactgaaggatattgttgaattaagactgtcattgttaaacacagaactgattccaattgcagacatgcacaatgttgtggaagaatcattggaacagtttgacccaagaattgcaaagtcatataaagactatcgcaactataaaaaagactttgttcacatgatggataaagtatatcagaaatcacaatccatcagatttattggtgacaaagagaatgcaaacactgacagcacattggtagcaactaaaagatgcttgatattcaatgacctgaataaaagactgtacagaaaattctttatgacacaggaagaacttcaagcatgtaaagatggttacatatatgtacatgaccaatcagcaaggttggacacaatgaactgttgtctgtgtgatgttggttcagtcatgaagggtggttttgaaatggggaatatttggtataacgaaccaaagacccttgatactgcttttgatgtacttggtgacatcattctttcaacagcttcacagcagtatggtggattcactgttcctgaagtggacaagattctttcaccttatgcggtgaaatcattcaagaaatatgttgatgaatactatcagatgatatcagcatattcagaacttgattcagatgatgtatcaaagaatgcaaacacctatgcaatgcaaaaggtcaaaagagattttgaacagggattccaaggaatagaaatgaagctgaacacagttggttcaagcaggggtgattatccattcatcacaatgacatttggtcttgcaacagatgaatttggaaagatggcatccatcacattccttgaagttcatgcaaaggggcagggcaaggaaggaaacaaaaagcctgtgttattccctaagttggtatttttgtatgatgaaaatctgcatggtgaaggatgcatcaatgaagatgtctttgaagcagggattgaatgcagttccaaaacaatgtatcctgattggttatcactgacaggtgaaggatatgttgcttccatgtataagaaatatggaagggtggtttcccctatgggatgcagggcattcttatcaccttggtatgaaaaaggtggaatgcatcctgctgatgaatcagacaaacctgtgtttgttggaagattcaacattggtgcagttagtcttcatcttccaatgattcttgcaaaatcaagacaggaaagcaaagacttctatgaagtgcttgattattatctgaacatgattagaaagattcatcaaaggacatatgactatcttggtgaaatgaaagcatcaacaaacccaattcagtattgtgaaggtggtttctatggtggacacctaaaactaacagacaaaatcaaaccattgctgaaaccaatgactgcatcctttggaatcacagcattgaatgaacttcaggaattatacaatggaaaatcccttgtggaagatggacagtttgcgttggatgttctgaagtatatcaatgacaaggtgaatgaattcaaggaagaagatggttggttatatgcaatctatggaacacctgctgaatcactttgtggtcttcagattgaacagttcagaaaaatgtatggtgtgattgaaaatgtatctgacagaccttatgtgtcaaacagcttccattgtcatgtgactgaagacatcacaccaattcagaagcaggatttggaaggtagattttgggatttatgcaatggtgggaaaatccaatatgtaagatatccgattgactacaacaaagatgcaatcaggacattagtcagaagggcaatggataaaggattctatgaaggtgtgaacttatcacttgcatattgtgatgattgtggacatcaggaacttgaaatggatgtgtgtcctgtgtgtggttcaacgaacctgacaaagattgacagaatgaatggatatctttcttatagcagggtacatggtgatacaagattgaacagtgcaaagatggcagagattaaagaaaggaaatcaatgtaatgaagtgtgatggatgttttggtgcttcatttgatgattgtaaaaggtgtaagaaaatgacaggaaaagaatatcaaaaattagcaatgagaacatgcagtattccatatgacaataaggaaggaagattgcatcatgcagtgtttggacttacttcagaagcaggtgaagttgcaggaattcttcagaaggtatatcagggacatgaatttgacaaagagcatatcaagaaagaacttggtgactgtctttggatgattgctgaagcatgtgaagcacttgaccttgatatggatgatgtgatgcagacaaacattgacaagttgaaagcaagatatcctgaaggattcagtgctgacaggtcacttcacagaaaagaaggtgacatttaatgttcttaaaattagcacttattttcattatttggggaatttatggtgatttagaaaagaaaaatgatgaaacttcttcattttgtatggttttattaacttttttaatacttttcagttaggcggtgaagtgatgttaagatgtgaaattttggatgtgcagggttttaaccctgctatccatggaatgagaaacccaaagaacagttgggataagtcagacagttatgatgcagttgattgtggtaaatgtggactaattgaagaaaagggtgtctgcaacaaagaagacagacttggaagatgtgataacttcagatgttatgcagtcggtgataatgacctgaagctgatgaaaacattattcaatgcaggaacagaacacagaaaatatgacagaatgattcaggtatggatggatattgaagcacctttgtattggtggaaggaatttgacacatacaagattggaactgttgcaaatagttgttctaccatgcataagattcacagcagggatttgaccttgaatgacttcagcactgaacatctttccaagactaacctgattgtggtggatatggttattgatgcaatcaataatgcaagacaagacttccttcagaatcatgacaaaattgattggtggcagatgattcagcttcttccaagttcatataatcagaagcgaacagttatgatgaactatgaagtgattgcaagaatcattgaacaaaggtcacatcataagttggatgaatggcatcagcttgttgatgttcttggtggtcttccttacatgcaggaattgatgaaataactgttcttggttgttcttggtgcttagaattttgacaccaccaagaacaggacacagcagtggttgaagggtgtgcaagaacaacaaagaacactagcaagaacagcgaaaagcctttatttataagggttttaagacttttgttcttggtgttcttggtgttcttggtacttttcacttttaaataaaaatagtaattttattgtattttactatatatttatatgattttaggtaaaaaaaaataaatatatagtagtagtgttttagcaagaacaccaagaacacaaaagacaggcggtgatgaaaattgattcttgatgatatcagagaattgaaaaaggacattgatgaattgaagatgaagattgatgcatttacaacagcaggtgcaatcagatatgacaaggaatgtgttcagacaagtccatcaggtgattcacttgaaaaaatgattattagattgattgaagataaggataatcttgaacatctgataaaagaatatcaatatatgtgttcaaaagtaaattttgctttatatacaatcagacagcaggaatttatcagattgtattattttcaagcgtattctatgaaacaatgttgtcatgaaatgagaacgacatacaataatctttgtaatataaaaaaaaggatagagtgctgaacaaattcagtataatgcttgacaagtgaactgaatatgttataatatgtatgatgaataagtataaataaaaataagtgaaagacaccaccctgaaaagggcaggtgtctttttgcgttggttaataacaaagaaaggagtgttgcaggatggcaagaaagctgactgacaaacagaagaaatttgttgaagaatacctgattgacctgaatgcaacacaggcttgcatcagggcaggttataaacctgaaaatgctgacaagatggggtcagaactactagggaaaactagagtttcagaagcaattgctaatgcaatggcagaaagaagcagaagaacaggaatcaatcaggatagaatcgttcaggaacttgcaagaatagcatttgttaagataacagatgttgttgattctgatggtgaaataaatacaaatgcttctgatgatgaccttgcatgtattgaatcatacaaggttgaagattctgattcagtgaatggttcatcttccaaaagggaagtcaaacttgcttccaaaataaaagcacttgaattattagggaagcatgttggaatgtggaatgacaaaattcaagttgatgtttccattcctgtgtttgggggtgaagatgaccttgaagaataaacacaggaataatgggaaaggaaagggcaacagaaaagaacagctaaaaagaagacgaaaaagacagaagaatcaagtcccaaagaccaagaattcttattggtgcattgatggaaatttcaccaatcatcctgttgcttactgtacacattatcatggtgtattgacacagggattgatggatgtacataaatgcaaagaacatggatgtttcaggttaagggaaggtgataaatttgaataagaaatattatcacctgcctgatatcgttggaaaaggatataagaagttttggaacttcaaaggaagatacagagttgtaaaaggaagtcgtgcttccaagaaatccaagacaacatcactttggtacatttacaacctgatgaaatatcctgaatcaaatctgttggtcatcagaaagacattcagaacattgaaagattcttgttatgctgatttaaaatgggcatgtcacagatttggtgttgaccatttatggcagttcacattgtcacctttggaagcaacatatcttccaacaggtcaaaagatatatttcaggggattggatgaccctttgaaagtcacatctattgcagttgataaaggctgtctgtgttggatgtggattgaagaagcatatgaaatcatgtctgaagctgattttgatatgttggatgaatcaatcaggggtgaatgtcctgatggactatggaagcagataacactgacattcaacccttggaatgaacatcattggatgaagaaacgattctttgataatcctgaccctgatacacttgcattgactactaactatttatgcaatgaatggttggacaaagcagacttgcaggtgtttgaaagaatgaaaaagaacaatccaagaagatatgcagttgcaggtcttggtggatggggaattgttgatggtcttgtatatgagaattggaaagaacaggcattcacacttgatgatgtaaggaattgcaaaacaagatgtggacttgactttggttatacaaatgacccttcagcatcaccaatcatgtttcttgatttggaaaataagaaattgtatgtgtgggatgaactttataaaacaggtttgtccaataaaaaaatatatgaagaactatcatcaatgggatatggaaaagagaaattcacaggtgattctgctgaaccaaagtccattgatgaattgaaatcccttggactaagaatcaagggggcaaagaaaggaaaagacagcatcaacaatggaatacagtggattcaagaccttgaaatcattgttcatccaagatgtgtcaacttcctgacagaaatatccaactatacatgggataaagataaatttggaaacaaactgaacagaccaattgatgatttcaaccacttaatggatgcaatgcgttatgggttggaagatgacatcattggaaatgcttggttgtattagaaaggatggtgaagaaatgtgttaaaggaagatgaaattctgaagtttattcaggaagacaaggtgtcaaccaagaaaaaccttgcttccattggtcaaaaatactatgatgcagaccatgatatcatgcattatagaatgttttattttaatgctgatggaaagttagtggaagacacaacaagaagcaatgtcaagatttcacatccattcttcactgaattggttgaccaagcagtgcagtacatgttgtcaggtgaaaatggaatcatccattctgatattcctgaacttcagacaagattggatgaatactttgatgatgacttcatctgtgaattgaatgatgttctgacaggtacaatggcaaagggatttgaatatatgtatgcttacatgaacaaagatgggaaactgtcatttgaatgtgcagattcccttggtgttgtagaagtcagagaaaaggacacagatgatggatgtgcctatgtgatttattggtatgtggataagctaaccaaggaaaataaggtcatcaagcgtattcaggtgtgggatgaaaatcagacaacattctatgtacaggaagaagaaggaaagctaattcttgatgaatcagaaccaatcaatccaagaccacatgtgatttataagaaagatggtgatgaatccatctattatgaaaactttggtttcattccatttttcagattggacaataataaaaagcagtggtcaggacttaaaccaatcaaggatttaattgatgactatgacatcatgtcatgtggtctttcaaataaccttgctgattttgattatccattgcatgttgtcaaaggcttccaaggtgataatcttgatgaacttcagcagaacctgaagaccaagaagatgattggtgttgaccctgaagggggtgtggaagtccacacaatagatattccatatcaggcaagacaggcaaagatgcaggaagatgaaaagaacatttacagatttggaatgggattcaattctgcacagcttggtgatggtaatgtgaccaatgttgttatcaaatcaagatatgcacttcttgatttaaagtgcaacaagttggaaatcagaatgaagcaattcctgaagaagattgtgaaggttgtcattggtgaaatcaatagaattgatggaactgattatcaggttgcagatgtgtggtttgattttaaacgtgaggtcatgactaatgcacaggataatgcacagattgaattgactgatgcacagaaacagcagatacaaatcaatataatcctgtcacttcagggtgttcttgatgatgaaacaatcattcagaccatctgtgaaatccttgatattgattatgaagatatcaaagacaaacttcctgaagatgaagaacaggataatcagcttgcacaatccaccttggaagggattgttcctgaagaaggtggtgaagatatagatgaataagactgaaaaacagattgctaaatatcagcttcagcaggaacaaaagaccttgcgtgaattgaaacaggtatatgcacaggcatcaaaagacctgcaaaaatcaatcaatgacctgaatcttagaactgatatgcagaatcttcagtctatcatctatcaggttaaatatcaggaagcaatgaagaaacagattgatggtattcttgataagctgaacaaagggtcttatcaaaccatcaatgaatatcttcaggatgcttatcacaatggatatattggaaacatgtattctttacagaaacagggaattccaatcacagttccaattgaccaaaagaaagtgctgactgcacttcagacagattcaaaactgtcttccaagtatcattcaggtaatgtcttgaaaggaaggcttgctgaagatgtcaaaaaactgaaagtgaccatcagggcagagttatcaaggggaattgcaaatggtgaaacatggcaacaggtagcatataagattgcacttggtatgaataacccaatgtcaaaagccttgaacatggcaatgagaattgcaagaactgaaggtcacagagtgaatcagcagggatttcttgatgcaggtactgaagcaaagaaaaagggtgctgacattgtaaaacaatgggatgcaacacttgattcagtcacaagaccttggcatcaggaagcagatggtcaaatcagggaatgggatgacttctttgaagttggcggtgaaaagatgaaagcaccatccattggtggttctgcaaggaatgtctgcaattgcagatgtcaacttcttcaaagggcaaaatgggcattggatgaatctgaattgaaaacccttcaggacagagcatcattctttggattggataaatcaaagtcctttgaagacttcaaaaagaagtatttgaagttaccaagtaatgctgatacaatgaaattgaaaacattacctaaaccgacaggttcaaaagattcacattatgatggatttttcaaaagattgaatcagatgaatgttgattataatcctgttcagaatcaaattaagaaggtgacagaagaagaaatcatcaatcttcttgcaggtggtgacagaacttcaggttcatgtgcttctgttggtcttgcttatattggacaaaaacagggatgggatattcttgattttaggggaaacaaaagtcaggaattcttttcaaatggtctgaatcttaatggtttatcaaaaactgaaggaatcaaaaccttgaaagcagatggaaaatgttcattgactgttggtaataggttattgaaacaggtggaaacaggtaaagaatactatttatgtgttggaaaacatgcttctattgtcagaaaaacagaagaaggaaaacttcaatatttagaattacaatcagcatataatagtggttggacagatttcaatggaaatcctaaaagcacacttcatgacaggtttggttgtacttccacatcagattatggaacatcatcaacttatgatttcatgattgatattgaagaaagtgatttttcaacagatgatttcaaatctttacttggttacatcaacacatcagattctgcacagaagaagggaaaaaatggaacaatcaaataaatggtataaaaacaatcctgatgacaagatatggtggttgaacaatcctgaagtaaaaggtgaatgggtcttttcttttgataagaagactgaattcaatatgttcagagattacccatatgcattgacatcagaacaaaagaaaatctttgatgaagaaaatccatattggaagaacttcttcatggatagaacacagtaatttaaacaccttggaaacagggtgtttttattatgtcctaagtaagacattaaactgctttatttttatgtcattttcatgggtgaccatgtaaaacatcagtgactgacagtcacatccaagacataacttgtaaaaattgtaaatgtgaaaggaaggaatataacaatgacattacaggaattattgaaagcacagaacttgactgatgaacaggtcaaaggaattcttgatgctatgaaacagaacaaaatctatactgcatcagaagaaaatcttgatgtgagatatggaaaattaaagactgaccatgatgcaatggttgcaaaggatgcagaatcacagaagctgattgcagaacttcagaaagcaactaaaggtcaggaagatgtgcagacaaaaattacagagtatgaagcaacaattcaaaaacagcaggaagaacttgctgaagcaaaaacagaatctgcattgaagattggtcttctttcagcaggtgcaaaggcaactgacattgattatctgatttataaaatgaatcatgacagtgattggaaacctgaacttggtgaagatggacaggtcaaaggtcttgatgacaaggtgaaaggactgaaaacacagttcccaagtcagtttgaatcaacttctacaaagaagattgaagaaaagaaacttgaaaagcctgaacagaaagacacagtcacaaaggaagacttcaacaaaatgggatatcaggcaagaaacaagctattcaatgaaaatcctgaattatacaaagaattatcaagtaattaagaaaggttaaaaggtgaaaaattatggcaagtataacaactaaattatccaatattatcaatcctgaagtcatgtctgacatgattgaagcaaagattgaagcacagtgcaagattacaccatatgcacatgtaaacacagacttacaaggaacagcaggtgacacaatcacagttccatcttggaattacattggtgatgctgaagactttgatgttgaaaaggcatctgacacaaatgctgaagttgaaacaacaaatctgacagcaggaagcaccactttcacaattaagtgtgcaatgaaggctgtttctatcttacagactgcaatcaacagtggtcttggaaatccgattggtcaggcaactttgcagttagcaaaatctattgtcaacaaagtggacaatgaccttattgatgctatttatgcaaagatgactgcatccaaggataaatgcattactgctgatgaaaaagcaaattatgtcaactatgatggaattgttgatgcagtaactaagtttgaagatgaagaagatggaattgaaaaggttatgttcatccatccaaaacaggaaaaagcactgcttactgatgcagatttcatttctgctgataagtttgaagcaggtgttgcagtcaatggttctattggtaagattgcaggttgttggattaagaaatccaagaaagtaaaacaggaagaaacaaccaactgttggttaaatcctattatcaaacttgaacctgattctactgaaacagagtatacagaagatgaacttcctgcattaactatcttcttaaaaaaagatacacaggttgaccatgagtggtttcctaagaaacagaagcatgatatcactgcttctaagtattatggtgttgcagtaacaaatgcatctaaacttgttgttgcaaaattcaagggtgatgcacttactgcctaaataaagaaaggcggtgaatctgatgattatatcagttgatgatattgtgtccatgcctgattttataggacaggacacaaagattcttcaaaagaagctgaatgcattggaacttcttatcaggaagtataccaataacaattttcagaacagaagcatcagattcataggaaacagtcttggtgacagaatctttggtggtcatccattcatcagagtgggtgacaccattcagatttcagaatcagaagtgaatgatggactgtatgtggtcactgaagttggtaagaacttcataagacttgacaaagaagtgttcactgttgattccaatatggtcacaaaagttgtctatcctgaagatattcaggttggaatcatcaatcttctgaaatatgaagttgatatgcgtgataaggttggaattaaatctgaatcactgtcaagacattctgtgacctatgttgattatgatgcaaataatcaagtgatgggatatcctgtttccatacttggttttttaaaaccttacatgaaagcaagattctgatgatatcagttggtggaaatacaactgcattgattcaggtgaaagatgaaggaaaaaagaacatcattggtgaaaaggaacatgtgtggatggatgtcacatcactgaaaggttggttggacttatccaatggtcagaatgacattagtgaatacagtgcaaaggtgcaatcatccacacatattttcatctgtgattttaaatccttcagaaatctttcaaagaaatgggtttggaatccatttaacttgaaaacaggtgtgattcagtctgaacaggatgaaacaaagattgatgcaacatctgaaaatgcaagaatgattattgatggggttgaataccacatcttaatgattgatgaccctatgggaatgcatcagcacttggaaatcatgcttcagtatgtcgggggtggtttaggtgtctaagaatgtagaattccatagttattcagtgaatgtgaaaacagcactgaaagataaagcaattgcttttcttcatgaaattggtggtgaaatcaggtcacaggcacaaagaaatagcagaagaaagacatcacagacagcaggttcttatcaatacaaggttgatgaagatgcacttgcagttcacattggttcagattattggaatgcaatctatgaagaatttggaacaggtgaacatgcaatcaatggtggtggcagaaaaggttattgggtctttgttgacacaggtggaaaaccacaagcaccaaaaggtgggaagacatacaccaaggaagaagcaaaaagagttgttgctattatgagaaagaaaggattgaatgcttattataccaatggtaaaacagcaaacagacctttatacagagcattcacagcaacagaaggaaagattcagtctgttgctgaaagatattttgggggtgtttgataatgacaactgaaggtcttaattatataaacaacctgttagaatcattaaacattccctatgaattcatggaatggaattctgatattcctgaaacatattgggttggtgaatatcaggaaatagaaccattgaatgaagatggaatggaagaatgtaatttcattctgacaggtaacacaaaaggaagttttctgaatcttgaaaatgtcaaggaactgttgaaggacacacttggatgtgatggaatgacagacatcatgaaaagtggttcaggaattgcaatcatgtatgtgacagcatatcctgttccttcagttgaatttggtattcatagattagaaataacattaagaataaaagaatggaaggtgtaaaacatggcaaagtttggaaaaacaggtgtgacatctgacacacctaaaaagattttgtttggtgcaggtacgattcataagaatgtgacttatgatgaaagttcccacaaatggaattttgaaaattcaattatgggtgcaacacagggtggttctaagattacaatcacacctgaatttgcagacattgaagcagatggtgcaatggttgcagtaaaaggtcttaaagtcaaaacaggtgaaactgctgaaatggaaatcaatttccttgaaatcacaaaggatattatcaaatcagcaatcattggtgttgatgggacttccaaagataccaattatgacctgattgaatcaaaggcagatgttgaagatggtgattatcttcagaacattgcttttgttggtaagacattaggcggtaaaaatatcattgttattatggacaatgcactttgtacaagtggacttgaatcaaatggtgaaaataagaaagaaggggttggaacatatacatttgcatgtcatgcagaccttgattctgaccttgacacccttccttatcacatttattatccaaaaacacttgcgtaattagaaaggatggttttgaacaatggcaaaagtaaaggttataaatgaattcaatgacagatacacagggaaacttcacaagattggtgaagtgtttgaagctgatgacaaaagaatttctgaaatcatggaagtttcaaaacacctgattgaagtgcaggaagacaaagaacctgcaaaaagaacaagaaagaaagtgggtgaagactaatggaatttgaacttagaacactgaaatctgatgacttattcccaatgtttgggattctttcaaagattggtttcaaggatttaaaggaaatcatcacacctgataaaatcaaagacatgaagtcaatgattagtcagaaggatgatgaagatgaaaacacagatgctacaacaatgcttggtgtgtctgttgtgatggaagttgtatctatcatcatgaagaatcttccttcctgcaaaaatgaaatttacacttttctttcaggtctgtcaggaatgacagtcaaggaaattggaaaccttgatatggtaactttcactgaaatgattgttgctgttgttcagaagcaggaattcaaggattttttcaaggttgtttcaaaattgttcaagtaaaccatcttacttttatggacttgctattcagagaatacgcaagtccatttattttgcttgataaggtgatcggtgcagggcaattgatggacttcttggaagtctttgatgaaaaacaacagcacaatgaactttgggaattctatattcacaaacttccaccttgggatgaaagaacatttgaacagttcaagcatgatttgaaagttggtaacaaaccaaagggtgaaagaccaacaaaggaacagcttgaagcaaccataaaagattcttataaaatcatgcaaaattttgaaatagaaaaggaagggggttaattgaattatggatttgtttaaacttgttggaagtatcttcatcaataacaaagaagcaaacagtcagattgatgaaaccaatacaaaaggacagaatcttgcaaccaagattggttctgctatggaaacagcaggaaacaaaatcacaggtcttggaaaagcaattgcacctgtgtcagcagttcttgcaactgcactgactacttcaacaaagtcagcttctgactttcaaaatggtatggcaaagatgtcaaccttgtttgatacttccaagacttcagttagtgacttatccaaggaattcttgaccctatccaataaaacaggtttgtctgcatcagaacttgctgaagcaggatatcaggcactgtcagcaggtcagagtgtggacaaggttggaaagtttgttgaaacagcaggaaaccttgcaaaagcaggtttcacaagtacaacaacagcagtggatgtgttgacaacagcaatgaatgcttatggtaaatcagcaggaagtgctgaccaaatagcaaacaaacttgttagaacacagaacttaggtaaaacaactgttgatgaacttgcatctgcaatgggtaaagttattccaacagcttcttcaatgggtgtcaatatcaacaacttgacatcaggttatgtttcacttactaaacagggtattgcaacagcagaagcaaccacatacatgaacagtatgttcaatgaattgggtgattcaggaacaacacttggtggtgtcatcaaggaaaaaacaggaaagtcattccaagaatgtatgaattcaggaatgtcacttgctgatgttcttcaaatcacaaagcagtatgcagatgaaaatggtattgcctataatgaattatggtcatctgctgaagcaggaaaggcaggtcttgcaatcctgaatggtggtgttgatgaatttaacaagacagttgaaacaatggcatctgatacagatgatgttggtgaagcattggagaaattggaaacaccatcagtcaaggcacacaaagcaatcaatcagattaagaacagcggtattgaattaggtactgcattcattggtgctttagcaccaacacttgaaaaagtgtgtggtgttgtggaaaaggcaacaacatggttcagcagtcttgatgaacacaccaaaactatgattgcaacagcaatgggaattggtgcagttgcttcacctgttttgattatcggtggaaaaattatcagtggtattggttcaatggttggtaagattggaacagctatatcaaccatatcatcactgtcaggttctattggtggtctgtcaggtgtccttggtgcaatcacaagtcctattggattggtagttgtagcaattactgcattgattgcaatctttgttgcattgtataacaccaatgaagatttcaggaacactgttcagtcagcatgggcaaccatcaaagaaacaatcagcactgttattgaagcagtgaaagaattgatttcagcattcattcagcttgtcaaacaggcttgggatgcttggggtcaggatattatcaatgtagtaacaaatgcattcaattatatcagcacatttattgattcagcactgaagattgttcaggcagtcattcaaacagtgacagcactaatcaaaggtgattggtcaggtgtgtgggatggtattaaaaacattgtgtcaacagtgtgggatgcaatcaagaatttgatttcagcaggtattgaacttgtgaaatctatcattcagcttggtctgaatgttgtaaaaacagtatttacaacagtatggaatgcaatcaagggaattgttcaggcagtatggaatgacctgaagtcagtgattgaaactgtattgaatgcaatcaaatcattcatcagcacagcactgaatgcaatcaagtctgtattttctacaatttggaatgcaatcaaatctgttgtgacaacagtcatcaatgcaataaagtcagtgatttcatctgtctttaatgcgataaaatcaacaatcacaagtatcttgaattcaatcaaatctgtgttcagcagtgtttggaatggaatcaagtcaactgtgtcttcagttataaatggtattaaatccactatttcaagtggaatgaatggtgcaaaatcaactgtgacaggtgtattgaatggaatcaaaacttcattcacaagcatttggaatggatgtaaatctgttgtgtcaggtgctattgatagaatcaagtcaatcatgaatttcagttggtcattgccacatttgaaattaccacatgtttcaatcagtggttctttcagcttgacaccaccaagtgttccacattttggaatcagttggtataagaaagctatggacagtcctttcatgttcacacaaccaacattgtttgatgtgaatcctgtcacaggcactgcaaagggtgcaggtgaagcaggtgatgaaatcatgtatggacatagtaatctgatgaatgacattcaggatgcagttggtcatcatgacaacttaattgtgaaagccttgaatgattggtttgaacagttatttgcaatctttgaagaatggtttcctgaattcaaaggtcagttggttcttgacacaggtgcattggttgcagaaacagcacctgcaatggatgaagaacttggtaagattataagaagaaaggaaagacaataatgcagacagtgacatttggaacaaaaaattcatatgatgactttggtctaatcctgactgacaaagatattggatttcctgaaccaaagttggaagaagttgatgtgattggtgctgatggtgtcattgacttatcagaagtcttgaatgatgatatcaagtacaaaacacgaaaacttcaatttacttttacagttctgaagggaagtaaatattgggcatcaacagttgctgatgttgcaaattaccttcacggtaaaaagttaagaattcaaatggattttgaccctgcctattattacacaggcaggtgcaaaatcaattcattcaagacttccaaaaggttatgcaccatcacaattgatgctgaatgtgaaccttacagacttgatataaatggaaatggtgaaaaatggttgtgggacacattcagttttcagaatggtttcatcagagtgaatgcagtcacagtcaatggttcattgcaggtcaacttgcagaaccaaagaaagattgtatcaccaacattcacctgttcaacagcaatgactgtgacatttgatggtgttacatataaccttccaaaaggaaagacacaggttcttggaatcagacttcaatatggaacaaattatgtgacattcaaaggaaatggaacagtcaaaattgaatatcaagggggtgcgttataaatgtatcgtgtatattgtaatgattcccctttgtatgatttaagggatgaagaccttgttttgatttctccaactgtgaagattggggaaaacacagcagggtcttttgaattcagtattcttccaaaacatccacactatgaagaagtcaatgaattgacttcagtcattactgcttatgatggtgatgaagaaatcttttgtggaagggttgtggaaattacaaaggatttatacaacagaaagaaagtcatctgtgaaggtgaacttgcatattttaatgattccattcaaagacctgcaaaatatcagggattgacagtcaggggttatcttgaaaccttggtgaatatccataatcagcaggtaaagaatcagggcattgataaaaccttcaaagttggtgcagttactgttcaggataaaaatgattatgtttacaaatataccaattgggaatccacattggaagtcatcaagacagacctgttgaatacctatggtggttatttgagaatcagaaaagaaaatggtgtcagatatattgattaccttgctgattatccaaacacaaacacacaggtgattgaatttggttcaaacttattggacttcacacatgacatggttgcttctgatattgtcacagcagtcattccacttggtgcaaaattagaagatgtcacagaagttgaaggtcttgatgcttatctgacaatcaaagatgtcaatggtggtgttgactatgtgtattcacaggaagcagtcaaaagctatggatggatattcaaaacagtcaaatgggatgatgttcatgttgcagacaatcttctaaggaagggaaaggaatatctgtcagatattcagtttgcacagattacattgacagtatctgctgttgaccttcatatgcttcatgtggacatggaaagaatcaaaatccttgatagaatcagggtcacatcaacaccgaatggtcttgatagattttttcctgtcagtgaaatgacaatctatttggacaaaccatcaaacaataaacttacacttggaacaacatattcaaagaatagtttatcaacaaaaactgaatctaataatgcagatatcaagaaaaggattgaagaccttccaaagaaatctgaaattcttgaagaagcaagaaaaaatacttcacagttgattcattcagcaacaaatggacatgttgtcacaactgctgatgaacagcttatcatggacactgctgacaagaaaacagctagaagactttggagatggaacttgaatggtcttggatattccaagacaggttacaatggaagttttgacacagcaatcacaatggatggtcaaattgttggtgaaagattgactgttggttctattgatgcaagtaagttatcaacatcttataaaacatctgttgaaaaacagattagtaatgcaaaagaagatgttgaaaacgatgttcaggaagaattgaaatcttattggacaaagacagaagttgaaacagcaatcaatcaatctgcaaattcaattaaactgtcagcgaaagaaacagcttcaggattgatttcagaagcattgaaatcttattccacatcagcacagattgaagttacaacaaatgcaatcaaatcagaagtgaagaaaaaggttggttattctgaagtaatcagttcaatcaatcagtctgctgaatcagttgcaatcaaggcttccaagataaaacttgaaggtcttgtgacagcaaataaaaacttccaagtccttagtgatggaagtattgttgcaaaaaatggaacattcacaggtaatatcaaaggttcaagaattacaggttctacaatcaatattactgattcaaatggatgcactattgatttggatgcttcaggacttagaatcaatgcaaataagtatacagatatatttggacatcagggtggaaaacttgtcattggtacaacagcatctattcttgaagctatgttttcaccaatatgtttttatcctgaatcaggtggtgtgtggaatatgccacttgctgatggatgtaacaaatttagatttgtgtggaatgtaactaaatcaagttatgttgaaatccaaacattgtttggtgcatttggattgactgcatggtcatcagataagaatctaaaaaagaatattgttagttctgaaatcagtggaattgatgaaatcatgaaaattccacatttttcctttgactggaaagataaagattatcatgttgattgtggttatgttgcacaggatatggaaaaaataaatgacatttatgtcattaaaattccacagcatgatgataaaggaaattacacaggtgacagatatcaaattgatgaaactgcaatcatccctgtcatcacaaaggcattgcaggaaatcattgaaagattggaaaggttggaaaaataaatgaatataccattatctgttttgctagaaaatacaaaaatcaggatgattgattctgtgaataaagttattcaggaatcaaatcttcctgcttatctgatagaaggaattctgtcagatatccttgcagaagtcagaaagcagaagaatcttgaattagcatctgactatgcaaccatgaatgaagaaaaagataaaaaggaaggtgaagaataatggcaaacattaaaccttatacagatgaaattgcaaatgctgtttatggcgaagaagtcagaagttcaatcatcaatgcactgaataaagtcaatgatgataataatagttatcaggacatcaagaatcagattgttgcttccaaggatgatgttaatgaagctgttgcagaatttgatgcaaaggttgcttcagcacaggatgcaacaacagcacttattgatgcaacatccaaaggaaacacagcaaagtctgcacttgacagtgctatcacttcagcaaacacagcaagaactaatttagtttctgcaactacttcagcaaacaatgctgaaagtacactgaagtcagcaacatcaacagcacagtctgtcacagcatctgcaaatgatgtgaagaagaatcttgattcttccatcaattcagcaaacagtgctaaatctgcacttgatactgcaatcagtaatgcaaagacagctaaatcaaaccttgatgcaagtacatcaacaggtaacacagcaatgaataaccttgatactgcaatcagcaatgcaaccaagacaagaagtgacctgaatgcagttatcagttcagcacagtcagcacagtcatctttatcaggtgttattgcacaggcatcaacagcacagacaaaccttcaaaatgcaaccaatactgcaaatggtgttcttggtgaaatcactgctgaaaacacttcagcaaaagcaaaccttgatgcattaagaagtgaaaactttaattcacaggaaattctgtcaggtgttacagacatcagagcatatcttggaatgattgaaacagaagatgttcttggtatcacaatggattacaagaacaagacctgcacaagaatagcaggtgcaaagaatctgacagcaggtgcagactttgacaagttcagcatgtatggtggaagaaaaagatgcaatgtgtctgatggtggaacaatcaatgcttactatggtgaaaaaggttacacagaagatggttcaaatggtcaggtcatggtgtatcagcctaagttctattatcttgtgtgtccacttgaatatgacagacaggaaacaggctatggttatcatttaagaaaagcaaactactatgttagtgaaacacaaagggcaggattcaaacttcatcctgcattctatgacaagaatggaaatgaagttgattatatccttatgtcagcatatgaaggatgtatttatgacacatctgcaaatgcttatttaaaaaatgatgagcaggtcatggatgcttccaaagacaagttcagttccattgcaggtgcaagacctgcttcaggtgtatcacagaacctgacaagaccaaacattgaacagatggcaaagaacaggggtgaaggttggcattcctttggaatcaaaacagcatctatggaacagttactgatgattgttgaaatgggaatgatgaatcttcagactgctattggtcagggtgttgtcaatattccttgggcaacaggttctgacacaacaagttcttatgcaggtgcaacaggttcaacagcttcacttggtaatggtacaggcagagcaacagaaacaaccacatatgaaggtggtgttgctacaaagaacacagcagatggaaaaacttctatttgttatcgtggtgttgaaaacttttggggtaacatttggaaattcgcatatggtgtgaatatttggggtaatggaaagatggcaggtggtatgccttacatctgttcagatttcaattatgctgaaggaaagaacacagacaattatgaaggtgcaggattcacagtcacaaaagcaaatggatatatttcagcaatgggatattccactaagtatgattggttattcatggcatctgaatgtcttggaaacagttcacttcctgttggtgactatacttacatcactgaaaacctgaatggatataggattgctcggttgggcggtggttgggctggtggttctgatgcgggtggtttctattggagtttggctgacggtgttgggtatcgtggtcgtcttatcggcggtcgcttggtgtatgtaccaacagtcactgtttaattgaatatatgggttaggtaattgttgatggcaacatcttccaccttgttgttatatctgtacacaataaaaacattttcaagattactcaattaggcagtaattggaataatggttctaatgcaggtagtttctattggaatttgaataacagtgttgggaatcgtaatcgtaatatcagcagtcacttagtaaatgcgtggttgatttcaggcagtccaaaaggactgtctgttttcatatataaaaattgtggaaattacttgaccctgccacttggcaaaacacaaaagcctgtcatcaatagatgacagcatatggaataaatctgttttggtaaatcctgaaaggaagttgaagaatcagaaacacgcatacaaaaatgacagaaagaattggtggttgtagttatatgaagcgttatggacatttatatgaaaagatttatgatatggaaaatttaaagttggcacaccaacatgcaaagaaagggaaaggatggtatgcagaagtacaaatgattgattctgaccctgacaagtacctgaaggaattgcaggacatgctgatgaataaaacctatcatacatctgaatatgaagtgttctataaaaatgagcatgggaagacaagaaagatttataaacttccttattttcctgacagggttgcacagtgggcaatcttgcaggtaattgaaccatatttaatcaagcaccttatttctgataccttttcagcaatacctgacaggggaattcacaaaggacttagcagagtaaagaaagcagtccaacatgatgttccaaattgtcaatattgtctgaagatagatgcaagacattattatcaatcagtgaatcatgacattctgaaacagaaatacagaaagatgttcaaagataatgaccttctttggattcttgatgaaatcattgattcaatcaacacagcagaagatgaagaccttgtttcaatatatctgttggatgaagacattgacccaaacacaggaattccaattggaaactacctgtcacagtacagtgggaattattacttcagtgattttgaccattggatgaaagaagtcaagcatgtcaaatattacttcagatatatggatgacattgtgattcttgcaagaaccaaggaagaactgcatcaattgctgaaagaaatcaatgaatactttcataacaatatgaagttagaaatcaagaagaattatcaagtgtttccaacttatgtcaggggtattgattaccttggttatagggtgtttgtttcctatgtgctattaagaaagcagacctgcaaagacatgaagaagaaaatggtgaagataaggaagaaagttgaatcagggaacatgatgaactattcagaatggtgttcaataaattcttacaaaggttggactgattatggaaattgcttcagactgacacagaaatatgttgaaccattgattccatatgcaactaaatattatgaattgaatgtcaagaaaggtggaaaagtagcatgaaacagtatggaacacaaagaagcacagtgaaacctgaagatgtggaaatcactgaatcaagggtcttcagctatgaagatatcactgaaatcaaagtgaagaatcctgaatcagatgatgaagtcacaatgtatgaattcactttaacagagtataacaaagatgaatatatcaggattcaggcagaaaagaatgcaagtcttgaagaacagatgacacagacacaggttgcactgtgtgatgtatatgaaatgttagcatagaaaggatgtgaattgtcatggtgaagatttatgcaaatcttatcatcaaaggaatcaaaaccattgatgatgtaccaacaagaatcaaagatgaagtcaagcaggaattggtcaaagaaggtcatcctgaacttgctgaagtaggtgatgaaggttgataaccaatcttatcataaatattttatttagaaaggaagtggaaaacatggcagtagtatatgcaacacttatcatcaagggtgtgaagacaattgatgatgtccctgcaagaatcaaggacaaggttgttcaggttctgattgaccttgattgtggtgatttagcaggtcaggcataagtcaataacacacagcaaagcatcatgcagaaatgcatggtgcttattttatgcagaaaggaagataaacaagatgaatattaaagaaggaatttgcacaggcattggtgtcattggaagcatcattgcatcagcgtttggtggatgggacacaggtttggttacattacttatttttatgggaattgattacttttcaggattggtggttgcaggtgtttttcacaagtccaacaaaactgaatcaggtgcattggaaagcaaagcaggatggaaaggactttgcaggaaatgcatgacccttttgtttgtattgattgcatatagattagatttagcaattggtgtggattacatcagaaatgcagtcatcattggatttatggcaaatgaattgatttcaattgtggaaaatgcaggtcttatgggtcttccattacctgatgcaatcaacaaagcaattgatgttttaacagaacagaaagaagggtaataaatgactaatcatgaattcatcaagaaagttgcagatacagtctgcaaggtagcactgtcttatggaatcttggttcatagtccaatcattgcacaggcaatcttagaaagtgggtggggcaagtcaaaacttgcttccacctatcacaattattttggtctgaaatgtgggactaaatggacaggaaaatcagtgaatctgacaacacaggaagaatatgaagttggaacactgacaaccatcaaagacaattttagggtttatgacagcatggaagatggaatcaaagggtattttgaatttattcagcttccaagatatagcaatctgaagggcatcacagaccctaagacatatcttgaaaccatcaaggcagatggatatgcaacatcttctacttatgtagataacaacatgaagttaatcaatcagtatgatttgacacagtacgacaagaaagaaggtaacaacagtatgtcatatgatagaacagcagtagtgaatcaggcaaaagcatggcttggatataatgaagcagatggttcacacagagcaattattgatttatacaacacacagaatccaagaccaaggggttacaaagtaacatatacagatgcatggtgtgcaacctttgtatctgctgttgcagtgaaacttggttatacaagaatcatcccaacagaatgttcatgtaattacatgattaaaggttttcagcagattggatgttgggttgaaaatgatgcatatgttccaaaagcaggtgatgtgatattctatgattggcaggatttaggcattggtgacaatgttggttcatctgaccatgtaggaattgttgaaaaatgtgatggtaagacaatcacagtcattgaaggaaatatttcaaacaaggttggaagaagaacacttgcagtcaatggaaagtatatcagaggatttggtgttcctgcatacacaacacagtctgcatccacacctgcaccttctacaacaaagaaagacattacaaccattgcaaaagaagtcttagcaggtcagtggggcaatggtgatgacagaaagaacagactgacaaacgcaggttacgattatgcaacagttcaggcaaaggtcaatgaacttgtaagtggtaaaacatccacaccaacaaaatcagttgctgaagtagcaaaagaagttcttgcaggaaaatggggaaatggaactgcaagaaagactgcacttgaaaatgcaggatataactattctgaagttcagcagaaagtcaatgaaatttgtggacagaagtctgtgactgaagttgcaaaggaagttattcaggggaagtggggcaatggtgcaacacgaaaatctaggttagaacaggcaggatataattattctgctgttcaagcagaagtaaacagacttttgcattagtaacctgatagaaacaaaagagtaacaaacacatcagaaagccttataatataaggaacacagttatcttggaactatctttacggtaaaaaacacggattacaggaatttatcgtttacaaactgcacttttaaagatatgccggaaacggatgagctgtatgtcatggagggtggagtacacggcattactacacaggagagctgggatacaataaaggactggcttgaatcaatcggtaagctcgatacaactgatatggattcggaggtaaggatcgtaaacagtgaccttggaatggatgatacaaaggaaacaccatacagttatccggctcttaaggatcatatggatcttgcatcaggggcaggagcacttgtaaatacgaatgagtgtcatatacagatagcggataatggcatatattccatgagtgatggaaagataggagcatatctgaatacggatgcgcatgcgagcagtgacgctcttggaacatacacagatgatgttgtaaaatcggggacaatagacgagcttggaaaagaaagctatcagcttataaatggtgaattgaccattgaacagggggcagagcttacaggggaatattttgaaaaaggtactccgtttgtacccacagatggcattacattgtcagttcctgaggttcgcgtgttcaggctcggacaggtgtacggatatgattatatggttcaaaggaagtaccatggtgttccaatagcatatcatgattatggaaattatcagatatatggaaatgagtataattttgaagaggatatcaaacatgcatatgtagtggattctgatggagtcagtgcttatgcgggagttaacgattcggaaccgctggaaaatttgtattcgtcggatgagatattgggaataaaggatgccgcagatattttaagcgggaagatggcaaagtttttaaatgttgatgtacaaagtgtatgtcttacatatgtaccgcttaatttgggagatggttctgagtgcaaaatatatcttccagcatggcagtttgacggaataaacaggactaaggacgaaaacatcaggatgtatcttgatgcatttacaggagaggtctattactatacctatggggaggcggcttagtatgataagggcggaaatgaaaaaatatctgtattttccgtatctgctacttgcggtcataggatgtgttgtacttgcttttagcgcaaatgcggattatgatccgtcaggcagtgctgtgtcggtatttaggcttgcaataaccggcattgcacataaaagtgagcagccgatagaatacagcgcactttttatgtggataaaagggatgaacggctggcttccgcttatactgccgcttttaatgtcatttggatatatcgcagtgctttccgcggaacggcacaacggcatgacaggttttttgctcataaggtcgcaaaatgcaaagtattgtgccacaaaggtgacagcaggagtgcttacaggtggaattcttttcatgacagcgaacattgttttcggacttatgatgcttattgcatttccggcatatatatcattttccgtgaatgagcagatgatgtatgcagactggtacggaacaggcagtatggtgctcatatatgtggtaaaacggcttataggttctttcttatatggtatggcggcaagtatgtttggaataggagcagcaatattttttagggatcggtatatgctgctgtgccttccgtttctacttaattacatatacacgcagattctgcagagacttacacttgaaaacccggcagtggagaggtttaactcatcaaatctgatgaatgtgtcgggtgagagcggctggggatggacggtaggacttactatagtttgttatgtgatacttgttctgctgtattatgcacaggtgaaaaggaggcattgcgatggatagattttcgtttcgggcagcagtgcacattgcgcaagctgaattcaggcagtggctgcgcagcagcaggataatcatactgtttgtcatgctcgtatttgtgaatgtgcaggtgatcgggccgcttcgacagtgcaaaatgcttatgggagaaatgctttctatacctgaggcttttgtggctttgggaaattcgggagttatccttcttataatacctatactttttcttgtgctgatggctgattttccacagaggacgggaattgacaggttttatcagatgcgctgtacaaagaggacatggatatttggacaggcagtttttgcggcagcggcatcctgttttgtgcttttattccttttggtgtcatcgtgcgttcttatgataggaacaggcagatggagtctttcattttctgatgcggtcacacattttacttcagtttatccggataggacgggagattatgtggtgcagcttcttccgggaaatctgtatcagcagatgacacttgaacaggcacttatacacacattttgtctgctgcttttatattttctgctcatatcatatgtgctgcttttttcggctgtcagcaatcacagatatgtggggatactcgtaaatggctttgcaatcatactcggagcagtcacctgtgaggtcagaatgaagcagatgtggatacttccgatggcgcatacgataccgtggctgcactatgatgaatatcttgacaggatgaattttccgatgtggggatcatatctttatctgggagccataagtgcgctgcttcttgtgctttgctttgcaagggcaggacattatcaggtaaaggaatagggggaccgcgcatgatagaaataagaaatgtatcactaagactggatggcaaatcaattttaaataatatttcgctgacacttgaaccggggaaaatctatggacttgttggcagcaacggaagcggcaaaacaatgctgatgaaatgcatctgcggatttgtgcatccgacagagggagagataaaaacagacggcaggcgtgtgggaaaagatgtggattatttgccaaatgcaggaataatcattgaaacaccgggatttataccatattacagcgggctgcaaaatctacggctgcttgccggaatacgcagaaaggttacggatgatcagatacgtaaggctcttaagataacaggacttgatccggacagcagactgccggtgcgcaagtacagtcttggaatgaggcagcgccttgggattgcacaggcaatcatggagcagccggacatactgatactggatgagccgatgaacggactcgataaacacggtgtggctgatatacgtgagcttttgatggcgcttaaaaagcagggaaagctcatacttctggcaagccacaatccagcagatatcgagctgctttgtgatgaagtatatgaaatggagctgggaaacataagaaatttcagttaataaaaagtttataatttttattagcactcactattgacgagtgctaataatagtgctataacatacttgtaaacaaaagaaagcaaatttccgaaaggaaagttacaggtatataaggaggtatgacctatgttattaacaactacaaacaacaacttatttgatacatttttcagtgatccatggttcaatgatccttggtatgatgacagggacgtacagaaggcacagaagaaattatacggacacaacggaaagagaatgatgctcaccgatatcaaggaaagcgataaaggttatgagcttgagatggatcttccgggatttaaaaaggatgagattaaggcttctttagagaatggttatctgaccattacagcagagaaaggcttagagaaagatcagaaagaggaagagggcaagaagtatatctgcagagagcgctactcaggaagctgtcagagaaccttctatgtgggtgacgagattgagcaggatgacataaaggcatccttcaagcatggaatccttcgcctggatattccaaagaaacagcctaaaccacaggttgaggaaaagaaatgtatctccatcgagggataatcagatattgcaaatgataagcgggctgcctgtgcagtccgcttatactatatggtgtaatgtatattgtttaattatgatgataaattgttacaggtaaatagaaaggcaggtgagtataatggcagcaaagagagattattatgagactctcggagtgaacaagagtgcggataaagaggcaataaagaaggcttatcgtaagctggcaaagaagtatcatcctgatacaaatgcaggcaatccgcacgctgaggagatgttcaaggatgtcacggaggcatacaatgtattaagtgatgagaaaaaacgtaagctctatgatgagtttggctttgcaggactgcaggagggcttttccgaggaggctgcaagacaggctgcacatggtggctttggcggcttcggcggcaatggttctttcagtggctcatacagctcaaatggcggaccatttacacatcaggaatttcattttgagaacggctccggggatatggatgatattttctcaatgttcggagatatgttttcacatggtggcggtaatcacagtggctggagtacaagtggtaacagtggatttaccggaaatagcggtagctggagtaatttctcaggtggcagaagttcagccggtcgcaagggttctgatgttatggctgaccttacgatttcatttgacgaggctgtttttggatgcgagaaatctatttcgttacaggatccgtccacaggcaaggtttccaatctgtccatccatattccggcaggaatcgagtctggcaagacagtcagacttaaaggacagggaaatccgggcagaaacggtggtgcagccggagatgtgcttctcaaggtaaatgtgacaccgagccgggagtttgagcgaaagggtcagaatgtatacagtacaatccgtgttccgtttacgacagcggctctcggtggtaaggcgagggtgcatactctttatggagatgtggagtgcagcatcaaggcaggtacacagggcggcagcaagatacgtctcaagggcaagggtatttcaagcatgaagaatccttcagtaaagggagaccagtatgtgactgttgagatttcggttccacgcaggcttacgccaagggcaaaggaagcgcttgaggaatacagggctgtgagctgatgaattttatgtgctttatatatggaaaacaaatttgaaatccgctatactataggtattatagtacagcggattttttgcttgatgggataataagaaaggatacaacatgagcaattatataatggatcttagaaaggtggtcggacatgcccctttactgcaggcgattctatagagcttggagagactgtcgaggagcttaagttttttgatgtggctgatattccggaggatatttctgagccaattagacctgtatttcgtgaatatataaagatgaggaaaagagagtagcgatactctcttttcctcatatgacatgtgaaatatcgaagcttacatggcaataggagaagtattatcctcatattcgaagctatgctcatagatatattctggagcacaatctatttcatcattcatccatgtaatgacgccatgcataattttaaaatttgaaaatatagcatcatcttcaagtggtttaaatgcactacctgttaaaacggatgcatcaaacactcttttttcaccgcctgaaaatgtcacaatcatcattaaatgatctgtaacttttgcatctgttatagaaatcttatttgatttttcacttgcgtaagctataccattgacttcaaacattgtaattctccttataatggattaatcttatcgaagtgttctcctcgtacggcattattccaggctttgtatacttcctcttcatgaattgccaaccagccgattattatttttaattgttttgctggaattgagcctgcgagaaggtctccgtcaactgccacaactgcttcgtagtcgccataaaatgcatgaatatgtggcttgtgatgctgttgtgtatcattaaaatacattttaataataataccataaaatctgcttaattctggcataaatcccccttttataaatacattttgataattcaatcatatcaaaattttataaaaattacaattagaaataaactttaacgctttaaatgaaaaaagtgcttgcgcatgtcttataaaagagttatcataatacaaaacgaaacacttaggaggatttacaatggaaaagcgtatttcaggtcacacaggcttattagcactcataggatcaccggtcggtcattcaggttcaccggctatgtacaattacagttttgaaaaacttggtctggactatgcatacgttgcatttgatataaaagaagacaaggttaaggatgctattgcagcaatgaaaaccttcaacatgcgtggatgtaatgtgaccatgcctgataaggtagaggctgcaaagtacatggacgagctttcaccggcagcccagattatcggagccataaacactatagtaaatgacaacggcaagcttacaggacacatcacagatggtgagggattcgtacacaacttaaaggatcacggaattgacatcaaaggaaagaaaatcacagttgccggaggcggcggagctgctacagctatccaggtgcagtgcgcattggacggagctcgtgagattactattttcaacaaaaatgatgctttcttcgagcgtacactacagactgcagagaagatcaaaaaagcagttcctgattgtattgtaaatgtatacgatattgatgatacagccaagatgacagaggaaatccagtcaagcgatatctttgcaaatgcaacaatcgttggcatgaagcctctggatgatcagagcgtggtaaaagatctttcagctttcagaccggggcttgtagttgcagatgcagtttacaatccagaggagacaaagcttcttcgcgaagcaaaagaggcaggctgcacatgcgtaggcggaaagggaatgctcttatggcagggcgtcgccgcattcaagctttacacaggacaggatatgccggttgatgatgtgaagaaactgttcttcagttagatttaagttcttattacaatatcattagatagcttcctgttatacaggaatatgataaaacaacagctcgcggtttcccgcgagctgttgttttttaggagtttttataggtttattattttaaaggagaatttataaataatcgtgacgggcaagcacgtttaagatatttctaccttcttctgtaccctcaatgattctgcgggcacgcttgctgtctccgatatttacgatttcaacattggtattactgaaagcctcatcaatctctgaaagaacaggtgtgttggctctcataccaaggcagatgaatccgtaatcaaatgggatttcctcaatctcaccctctggattctttacgatgaaacggtcattcttaacctcctgcagagcagtgttggtcatctgttttacaccgtattttgccatttttgcgtttgtgtcacactttgtgacagggtcaagtccgtttccaatcattggaagcatctcaaccattgttacctctgcgcctctttctgtgaagaattccatcacgtcaagacctacggcaccaccgccgatgatggcgattttctgtcccttcatatcctcaggatactcattgatgcgctcaatcatcttaaggactgttgcaacatttgtgccatccttgtcaacgagatcgtgaagacctgtgataggtgggagagtaggtacagagcctgttgcgtttactatgatatcagggtttaaggcctttaccatatcaactgttgctgctgtatttttgaaaacaaacaggttatgaagcttgcttgcacggtgaatcatgtagttagggaagtctgcaagacgcttcttgtcaggaatcttggagataactgatgcaagtccgccaagctcagccttcttctcaatgaggaatgttgtacatccaacctctgctgctgtgcaggctgcctcaagaccggcagtaccaccaccgattacaaccacgttgcaaggcttgtttacctttgtcttcatgtaatcctcaccactgtttacggcagggtttactgtacagcggattggctggttgagaccgattctgtgtccggcgcatccgatgttacatgagatacattttctgatatcgcatacatttccgaactctaccttattaacccactcagggtcagcgataagtccacggcccataccgatgaaatcagcatcgcctcctgcaaggatatcctcggctacctgtgggtcacggatatttcctactgtgatacacggcttgttgtatttctcttttacagcctttgccatgaatgagcgccatccgtcaggtaagtagtttgcatcaatctggtactggatagatccgttgagaccgcatgatacgtcgaatacatctacttccttctcaaaatactgtaagtactcaagtgtatcctcaagtgtgtttccaccctccatgagctcgtctgcactgatacggacgaagatagggaagaaaggtccaacctgcttacgaacctcctcgataaccagctttgcaaatcttgcacggttctctgcagagccgccgaactcgtcagttctcttgtttgtgataggtgaaaggaattggctgataaggtaagagtgtcctgcgtggatttcaacagcgtcgaagccgcagatctgggcgcgcttggctgcctcaccgtatttctttacgatgtgcatgatttcatccttctcgagaggtcttgggatttccccgcctgcctttgaaggtacgtctgatgctgatacaggctgcattccgatacgtgagctcattgcagaagcaccggcgtgatttaactgtattgcgatacatgcaccgtgcttgtgaacgctctcgcagagcttgaaaagtcttgggatgtagttgtccaaatcaatacgaagctgtgtagttccgtttgaaccctgcggagagtcaacgctggcattctcaacgatgatgagaccagtgccgccctttgctctctgctcatagtagtttatgtggagaaagctcatttctccgttctgctcaccgtagttagttcccattggagtcatgacgatacggttcttcactgtcattctgcgtactgtaattggctcaaaaatatgtggatatttgtttttcatagtattttttctccttaatctgctaaccgggtgggcacacggtagtgtaaattgctctcattacattatagttttgtttcattaaacttattgtaaatatttgttatcaaaggctgtgatatacaaagtatgtgatttttttaacaatcaaaaagtgcaatgcactcttgttacattcaaggtacagcaaaaatgtataaatgtccaatgcatcttttatacgaaatctatagtttttgtctatcaaatggtgtatattatttctagactttgttgtgagcgtttgtcggatgtccgcttgccctgcgctgcacaccggtggtatatgctcgatttatgacgtgtcgtgtgggaattatatgccgcctcaagcaaaagtggcgcggaaaatactcgttcaagcagcacagcctttagtatactaataaagtaaaaagcgcgtttgatttttcgcgcctgataaactctgtttgaggcggcatttactcccactagactaaggaattatgagagcatataccaccggtgtgcagcgcagggcaagcggacctccggcgaataaatatataaatacacagggggtgtactatgaatctgagtcaattgcagtacttcaaggtactggcgcaggaagaacattatacgagggcggcacagatgctgtcgattacgcagccgtctttaagccatgcaatctcacagctggagcaggagcttggcacgcgtttgtttgagaaaaagggaagaaatgtcgtgctgaccagatatgggaagatgtttctgccgtatgttgaggaatcattaaaggtgcttaatgagggtgtgcagcgcattcaggaggtcaatggcagcaggcatggaatcatacatctggcatatatatatacgatgggaagtgagttcgcgccaaagctggtgcgtaaatttctcgatgcatacccggattatgatatagaatttcattttacggttggaacaaccagtgagattatagatggactaaaggatgacaaatatgacatagttttttcttcttataaggatggggaacaggatatagattttaagaagattgcgaatcagaagcttgtgcttgcagtgcccatggaccatccgctttccataaaggacagtgtggatttgcgggacacaatagagtatccgcagatttattttgagaagggcagcggtctgcgtccggtcattgaccagatgtttgaggagataggacagtttccgaaggtagccttcgagatggaggaggattcgagtatggcgggtctcgtggcgcagggctttggaatagctgtgatgcctgatattccaatgcttcggtcactttctgtaaagacgcttgatatatacaatcctccttatgagagagcggtgtatctggcaacgcttaagcagagatatttatcaccggttgcgaaggcatttatcaggtttgtgatcgaggagactgcctagctgcagctttcccgcacaaactctatgaagcgcttgatagccggaagctggtatttgcctgtcatgtagcccatgtatacagtgtgtgagaatgactcatgcgatacgaggtggcgtatgcagatgtcatcgcggtgaattgcatcgacatctgcgacaagcgcaatgccaaagccctgcgccacgagggaggcgatgccgttctcatcgggtgactcacatatgaagtttggcgatacatcatgcttcttgaaaaagcttctggtgtacttgccaaggcctgagtgtctggcatagccgagcacaggatagtctgcgaaatcagtggcttccatggtatccttaagtgtcagtgggtggccgggaggcagtatggcaactatttcctgccttataataggaacaaaatcaataccattttcatctggcgagtatgaaccgaaaattatgtcatacctgcctttttttaatccctcaatattcacagaggtgatgtcctgaaagaaattgaacgtgatatttttattttccttttcggtgaggaaagagcgcacgatagttgggataaacacctttgcaagaggtgatacgtaggcgatatcgatgtgtccgccgtcggttgcaatctggtgcattttgttctcggctctctttacatcgtccagaatagtagacacgtgttctaaaaaaatctccccggccttggtcagtattacattcctgcctctcttttcaaataaagtgacgccaagctcgtcctctaaagctgctatcgaacggctgaggcttggttctgtgatattcattttttcggcagcctgattgaagtgttccagaactgccgcttggtaaaaataacttaattgattgagtgtcatgcataaatctccataaaataatagatatagtctatgaattacaaatattatagcctaaatttgtgcatattataacataattagtacagtaatgctattaaaaaataacaaaataagcattggaagtatcgaaaataatgcgttataatatcattatcaaaggttgttaagtttttaacgaagtgggcatcgttgaaaacatagctaagaaaatacgaataatcaatattattacatttaaaaatgaaggagatttaatcatggcagagagaatcacaggacacacagaactcatcggacttatggcttacccaatcagacattcaagctcaccggcaatgcacaatgaggcatttgcatatcttggacttgactacgcttatctggcatttgaggttgataacaacactcttgaggatgcggttaagggaatcagagcattaaagctagtaggctctaatgtatcaatgccaaacaagacagttgtaggacagtacttagacaagctttcaccggcagcagagctttgcggagctgtaaatacaatagtaaacgagaacggagtacttacaggacacatcacagacggtatcggcttcatgcaggcactcaaggataacgacatcgatgttatcggaaagaagatgacaatcgcaggagcaggcggagctgctacagctatcgagattcaggcagcacttgacggtgtcaaggaaatctcaatcttcaacatccatgacaagttctgggcaaacgctgaagagacagttaggaagatcaacgagaagacagactgcaaggcaactctttacgaccttgatgacaaggagaagttaagagaagagatggctgattcttacatcttcgtaaacggaacaggtgttggcatgaagccactcgagggaatgtctgtagtacctgacaaatcattcttccgtcctgagctaatcgtaattgacgtaccttactctccacttgagacaaagatgcgttctatggcaaaagaggtgggctgcaagacaatgaacggtcttggaatgatgcttttccagggagcagcagccttcaagctctggacaggaaaagatatgccaatcgagcatatgaaggaagtattaaacatcagatatgatgattaatcagacacagaaattaaggagaacactgatgaataaaaaatatttacctagcgcattaatcctttacttaaactactttatacacggagtgggctgctctatcctcggacaggcagtcatcaaggaggctctcgcagcttcatggggagtgcaggttatggctattacagctatttcagcagccctgggacttggacgtcttatcgcacttccgtttgcaggacctttatcggataagctcggacgccgtatctcaacagcaatcggaagcggctcttatgctatctacctgatcggacttgcccttgcattcaatgcaggaacacatggtggataccagattgcttatatctgtgctatcattggcggcattgcaaactcattccttgatacaggaatttaccctgcagtatcagaaatcatctacaaagcaccgggtgttgcgacaatgggaatcaaattcttcatcgctatcgcacagatgcttttaccattcgtacttggtatgacagttgctacaacagcagcaggacttacatcatacaacacactgtttttcggatgtggaatcatctacattgtacttttagtattagtaatgctctttccgcttcctgataccgatgcaaaggcagagggaaagaaagaaggacttatcgcaagcttaaagcatacacatttttctgttgagtcaatcgcaatgattatcattggatttacatgtacaggaaccttccagttatggctcaactgtgcacagaactttgcaaaagagaacgtaggctgggctgatccgtcagttatgcagtcatactactcagcaggaaccatgatagctcttatcgtaactgcacttttaacaagaaaaatcaaggacgtcagatttatccttgtttaccctgtaatctgccttgcaacaatggtagtagtgttagtcggacagacaaagccactcatgatcgcaggtgcattcatcatcggatgggcaggagcaggcggacttttacagatcgcaacatctgtatgcaacatgctcttccctaagatcaagggaacagtaacagcgctcgtaatgatcgcttcatcactttgcaactacacaatccttacagcagcatcaaagatgcagccatcacaggttatggtaatgaacatcgtgctcacagcaatcggcgtggtacttggattattcgtaaacctgcgctatactaagatggtagagctgtctaaagaggattaaaacgttactcaaacttcccatactatgggagccggcctagcatacagtgtattcctcagaaaaaatatgaagttaaccacggatttgaatcgatatagattactttaatatgtaaggttatatccgtttttaaagttaatggaactccgtggcagttcatattgttttcttcggaacaactgtatactctccggcaaatatagttctatgtatggaatgttttggtacattaaattatactggggagtataattatcatacagttaaagtaagaaaggaaaaaatcatgaacaccattaaggttagagatattgaaatcggtgcgggcgcacctaaaatcatcgttcctatcgtgggcgttacgaaagacgacatcatcgcagaggcaaagacatttgactctatcccggttgatatggttgagtggcgtgttgactggttcgagaatgtattcgagtttgacaaggttgaggaagtattaaaggagcttcgtgatgctctcggaaatattccaatccttatgacattccgtacttcaaaagagggcggagagaaagctatcgagcctgaggcttatgcaaagcttaatatcaaggctgcacagacaggatacgttgattttgtagatgtagagatttttacaggcgatgagattgtaaagaaaatcatcgacggcgtacatgctgcaggtgcaagagttatcgcttcaaaccatgatttcttcaagactcctgcacagtctgatattgtttacagacttcgcaagatgcaggatatgggagctgatatccctaagattgcagttatgccacagaataagcgagacgtactcacacttctttctgctacagaggaaatggttacagattacgctgacagaccaatcatcacaatgtcaatggcaggcacaggtgttataagccgtctctgcggtgaggtattcggatcttcaatgacattcggtgccgcaaagaaagcatctgcacccggacagatgggagtagaggatctgtctacggtacttggattacttcataagagcatgtaagaaaagcttgtataaaaccatgcgataaaataaaatggcgcctcggcatctgtaaactatgtgctgtgacgccatttttgaagatgataacaaatagtaatatataaaattgtgaatatttacgtggaaaaacagcaataattcagtaaaaataatacgtataattattcacggaaaggggacatttcatgaagaaaatactgcactatctggatgaatatcttgaagaatttttaatggtcattttcctgattgcgatgactcttatcatgggtattcaggtgttttcaagatatattcttggcatgtcgctttcatggtctgaggaaatcacaagatacctgtttatctggtcggcatttttgagtgtcagcctttgcacacgtaaatgcatatccataaagatagaccagtttatacagctttttccacgaagaggaaaatcactctggaaggtattaaatctgacagttgagtttgtgtttttcgtatatctgataccgtattcattcatatatctgaaaaatacaatagaaagcggtcaggtaagtcctgcctgcggtatccctatgtactatgtgcaggcggcaccgtttgtatgctttataatcacggctttccgcatcgcgcagagatggtttggcgagtggaaaattgtcctgaaaaaagatgaaaagcctcttgaggagggcagtattgcctcggttatagaggaagccgttgtcgaagacacttaccgcgagaaagagcttgtggaggatattgaagcaattcatagtaaagctgaaaagagaaaggagaaatagatgtcagcagcagtagtttttatattatttgtgatatgtctggtcattgctattccggtatctatttccctgggaatagtggcagtgctgccgggtgcgtttgactcatcttttacagccagtgccagctatgttatccgctctatgctcggtggtatagacagcttcccgcttttagcggtgcctatgtttgtgcttgccggaatcgtcatggcacacggcaaaatttcacaaaaattgtttgatgtttttgtgtattttataggaaaaagaaccgcaggaatcccatgtgcggttatcatcacctgcttgttctatggagcgatttccggctctgcgcctgcaactgttgcggctgtcggaagtatgaccattccgcttcttatggagctgggctacaaaaaggatttttcaacggcaattgttgcggttgcgggaggactcggagtcatcataccgccaagcataccttttatcatgtatgcgatggcaaccggtgagtcggtcagtgatctctttcttgcaggaatcattccgggacttttgataggagcgcttcttatgttttatgcatattatcactgcaagcgctatggagaggacaagaaaaagataaatgcaaaggtctctgagcttagaagcaaggggctttttagcataatgaaggacagtatatgggcgcttttaagcccggttatagtacttggatgcatttacgccggtatagcttcgcctacagaggctgcggtgatttcagtattttatgcgctttttgtaagtctttttatttacaaatccataaaggtaaaagagatatggggcatcatggtggaggcgatgaagacatacgcacctatattgtttatacttgccgcatcgaccgcgttttcacgcgtgctcacactcatgcaggtgccacagacagtcagcgcatggatactagcacattttacaaatgagatagtgcttcttatcgtgataaacattttcctgcttattgtaggaatggtcatggataccacaccggctatccttattttaagcccaatcctgcttcctatcgtgcagagcatcggaatgaacccgatccactttggtgtagtcatgatcgtaaaccttgcaatcggatttgtcacaccgcctataggagtaaacctgtttgtggcaagctcactgacggatgttccggttatgcggatagcaaagaaggcggcgcctatgataggatatttcctgctggcacttttgctgcttacatttattccggcgatcagtctgtgcttattatagagaaatagtaactattcggtacagaaatatgtaataacaggtataagcagatttaatgatgattgtaggacatttaggcacacagttgtaattggagaaaaatatgagtagatttggcttgcttttatgtaaaaaagccggtaaatataataaaccgcgtagatcgtatagcaaatatagattgtggagaagagcagcagccgtcatgatgatactttcgcttacagcaggacttgccgcgtgcggcttagctggtgaaggctcgcaggacgcagctaaggatgccggggtacagcgctacgcatggcctctcggcagctcaagtcctgaggacaccgtgacacagatatatgcagagaaatttgccgatgaagtggaaagattaagcgatggcaaaatgaaaatcagtgtgtatccaaacagtgtactgggcggagacagagagcttctcgagtcatgcaaggatggagatataccttttgtagtacagaacactgcaccgcaggtcactttcatgaaggatactgcagtatttgatatgccggcactttttgacagcattgatgaggtacgtgagcatgtggacaatccaaagtttatgaagctcatgcagcaggtctacaatgacggcggctacgagcttttgggatatgcagaccagggcttccgtgtcatgacaacaaacaaaaagatagaaagccttgctgattttaagggtcagaaaatccgtaccatggaaaactcttaccatatggcatactggaaggcgctcggagcaagcccgacacctatgactttctcggaggtgtatatcggcttacagcagggcactatagatgcgcaggaaaacccatacgaggtaatcgtatccaataagctctacgagcagcaggattatgtagtggagacaaatcatctgccacatctgatatcgctcatagtaagcgaggagttcatgaaagaattgacagatgagcagcagcagattatccgtgaggcagccgagacagcgaaacagtacgccagagagcagtctgacgagaggattgcctcaaagataaagacaatcgaggatagcggcacacaaatcatcaccttaagcgatgaagtgcatgagcagattcgcaaggagtgtcagccgatatatgaatcgattgagaaaaatgtgtcgtctgatattgtggatgcatatctgacacaataacactttaaagcattaaaatattttgcttgataaattggtaaagtcttgttatactatgactaagaaatttgtggttatcaaaaatacgaaatattataacgtgaagttataataattataatttgacgatatttcgcttaaatacctaaatccaatatgaaaaccacacataagtaaggagacacaccatggacaaaatcgaggaaatccgcgcaaagattggagaatgtgacgatataataattaagcagcttgcggtcagaatgtcacacattcaggagattatatcatataagaaggcaacaggaatcccaatcttacagccagagcaggagaaaaagcagacagatgcacttgcggcaaagcttggcgacaatgaatttgaggaagagatacttgatattttcaagtatatcatgaagaacagccgtcgtatccaggcaaagagccttttcgattacaatatcttcctgatcggtttcatgggtgcaggaaaaagcactgtagcaggagaattaaaggataagctcgagatggaccgtgtcgagatggatcagatgattgttgagaatcgtggcatgtcaatttcagaaatatttgatgagttcggtgaggcatatttcagaaacttagagagcaacacacttatagagcttcagaagagaaagcagaccattgtttcctgcggtggaggtgttgtcatgagagaggaaaacgcagatcatatgaagaaaaacggccgtgtagttcttcttacagcaaagcctgagactatctacgagcgagtaaaggatagtgacgagcgcccgatactaaacggcaacatgaatgttgagtatatcagcggccttatggaaaagcgaaaggagcgctatgaggcggtggcagatgtaacagttgccacagatggcaagaatgtcacacagatatgcgaggaaatcattgcaaagcttatcgcacttgataatgagcaggacaataaacaggcataatacaggaatagcacagcacttattaaggcagcagccggatatcagaccggctgttgctttttgttcaaatacttcaggggtgtgtggcttgaaataattgcaaatatgatgtatagtactctacaatttaagagatactgattaagtatggcagcataacaaggaggtcataattatgtgtacagcagcaacttataaaacaaaggatttctattttggaagaacactcgactacgaattttcatatggagatgagattgcggtaacaccgcgaaactatgtgtttaatttcaggcattcgggaaagcttgaaaaccattatgcaatcattggaatggcacatgtggcaggtgactatcctctttactatgatgctataaatgaaaagggactcggtatggcaggactgaatttcgtgggaaatgcagcgtatgcggcagcagacgaaaacagctcatgcgagaatggcacatgcggcattgcaaagacaaaggtggcacagtttgagtttataccgtggatactgtcactatgcgctacggtagcggatgcaaaggaaaaattaaatcgtattttactggtagatacaccatttagcagtcagcttccggttgcacagcttcactggattatagccgacaaaaatgagtgcattgtggtggagtcgatggcagacggtatgcatgtttacgacaatccggtaggtgtgctcacaaacaatccgccattcccatatcagatggctgcactcaataattacagaggcttatctacaaagcagcctgaaaatacatttgcaccgggagtggagcttagtgcatacagccgcggaatgggaggactgggactgccgggtgatttatcatcgcagtcacgctttgtacgtgtggcattcacaaagcaaaactccaaatcggatgacagtgagaatgcaagtgtgagccagttcttccacatattaggctctgtggaccagcagagaggtctgtgcgaggtgacagagggcaaatatgagattacgctctacacctcatgctgcaactgcgacaagggaatctactattacaccacatatgacaatagccagatcacagcggtagacatgaacagggagaatcttgatgagaagctgcttatcagatatcctgttattacggagggaaagatttgttggcagaattagagaatctgtttgcgttgcaggataaaaattacagggaatttcatgcgaggcttatgcccaatattgaaaaagaacgcataataggaataagagtcccggtgcttagaaagtacgcaaaggagcttgctcatggcagcaggctctttttgtcggttcaaaaagaaaaacgggtctgtaatacagtgaaggaaaatgactgtgacaatgtggaaaagtttctaaacactctgccacattactactatgaggaaaataacctgcatatgtttctgattatgcagatgagggattatgatacagcattggcttatctggaagcatttctgccatacatagacaactgggcgacctgcgacagtggtgtgccggctgtgttcaaaaagcacaaaaatgagcttcttttgcatgtatatgagtggctggattcggataagccctacaccgtcaggtatggcattggcactttgatgcgcctatatctcgatgaggattttgatataaaatatgctttagatgtggcaaaaatccgttccaaggagtattatgtaaacatgatgaaggcgtggtatatcgctacggcacttgcaaagcagtatgatgcagtgctgccgatactgaaggaaaggcttatggatagctggagtcacaacaaggcgatacaaaaggcgcgtgagagctatcgcatcacgccacagcagaaggagtatctgagcacattaaaggtttaatgaaaagagacaaaaatttatgaaaataaaaagcttatttgaatcgaaatttataaaggtgtttgaccttcagtaccaagagggcaggcattattataatgccacaaggagagatgaagaagaccttgtagccgccaaatccacagaggagttcaagaaaatgcttccggatgcggtgagctgcgtggtgatatggaatccgtcaggtgatgacgagaaatcaggtcatgagccatgtctgttaatgaatcgcgagttccgatatccgacaggccagtacctgctaagcgtacctgcaggacttattgatccggaggattgcaccggggataatgataatacagcgtcacttataaaaaccgccatgcgtgagcttcatgaggaaacaggacttaaagtgacagaagaagatgaggtttcgataatcaatccatgtcttttcagtacaccgggcatgacagatgaaagtaacgcccttgtaaagattgtacttaaccgcgatagccttaatggaatgtcgcaggatggcgcagtgggcggcgagctctttgacggattcgaccttctgactaaggcgcaggcgaagaagatacttgaggatggagtggacgagcacggcatatactattctgtgtatacatgggcggcactcacgtatttcgtagcagacttgtggaggtagatagagaatgtagcgtggttagccagggaggcggttatatgctctcgtagagcgactagcgaagctgtttagagtctgtagaattatgccctggtaaccagaaatgcaccggcatggacgccggggcaaggcgttatgtgccatggacggcacataaaagccggtttagtcgagcatagaaaaactatgagcataattcgtacagcctcttaacagcgtagcgttagctcctagagagcatatggccgcatgccgggttaaccacgcagtggcatttaaaatacggaggaataacatgaacgataaaaaatactcgctgcgcccatatctgcttgcatacaaatggcactatgcgataggcatttttgtgcttcttgcagtagaccttgcaaatctgtacattccgcagtttattggggagataatcgacggaatcactgcaggaaagcttgatatggcgggcgtgggcggcattatatttaagatactgataacaggcctgataatcatggcggggcgctttggatggagatatttcatcataggagcatcaagaggaatagaatacagactgcgcgatgatatgttttcgcatatggagacactctcggcgcgctattacaacagccacaagacaggagatcttatggcatatttcactaacgatttacaggctgtcaggatgggaaccgggatggctgtcatcaccgtgtttgacgcggtaatcatgacggtgatggtgcttgtcaaaatggttgtatacgtggattttaagctgacattatttgcttttattccacttattttcattgcaatcggctgctatttttatggaatagagtcaaagaaacgtcaggtgaaaaggcaggatgctttctcctatctttctgacaaggtgcaggagagcattgccggtatccgcgtggtcaaggcatttgcgcaggaggacgaggactttaagcagtttgaaaaggcttgcgagaacagcagggagaaaaatcttgctgtggtaaagcttcgcgctgtctttggcccgacgctggatgccgtaatcggaataagcgtgatagtgacactccttgcaggtggcaggatggtgcttgacggacaggtttcgataggccagttcgtggcattcaactcatacatcgatatgcttgtgtggcctatgattgcggcaggcgactgtatcaacacattttcccaggcggctgcggcatggggcagaatccggactattttcgaggaaaaacctgatattgtcgatatggtgccaccggaaaatgtaatagaaaatgatggcatggcaggcagaaatacagataatttagctgagggtatttatgataaaatacaaatacatggcgatatacagcttagccacctcagcttcacataccctgacggcaccaagccggtgctttcagacgtgagcatacatgtgaagcagggcgagatgcttggtatcttaggacgtaccggaagtggaaaatcatcacttgccgaccttttgcttagagtctatgattgtgaaaacggcatgatacttttggatggccgcccgataacggactatccgctggcggttttacaccgtgatatctcatatgtgccacaggagaatttcctgttttccgacacactcgaggagaatatagcatttggtcttgaggacaggatcgccgacaacccggcaattcttgatgcggtaaaacaggctgcaaaggacgcgtgtatacacgataatatcatgggctttccggatgagtacaagaccatggttggagagcgcggagtgacactttcgggaggccagaagcagcgaagctcgatagccagagcacttttaaaggattctgcaatcctcatactggatgattcactttctgctgtcgataccgatacagaggagcagatacttgaaaacctcatggaaaccagacagggcaagacaaccatagtgattgcccacaggatttccacactgcagaaggctgaccatgtggcagtgctttctgacggaaaactgacagagtatggcactcctgaagagctgcttgagcttggcggtttttacgctgatatcagccataagcagcaacttgagagtgagcttggcagttaaagtgcttgaaaagagttgctatgcagatttgacgatgaatagttacgaaataacagagaagattatagtatgaattcgagtgaaaatataaataaaaacgaaatgaataaaaaaagctccacaatgcgcctcatagcctacatgaagccgtatgcccactgggtgatttttgcccttctgctggtgcttggactgacagcctttgacctttacaggccgatgctggtgggtgatgcaattgatgcttttggagcaaatggggattatgatgtaataattgctacagctatcaaatatgcggttgtacttgccttaagctttgcattcaacatcgctcagacctggatactgcagaaaacaggccagaatatcattcttcagatgagaaaagacctatacagacatatccagtctcttggaagcaggtattttgatatcacgccggttggaaagcttgtaacccgtgtgacaaatgatgttgaggctctcaatgagatgtattcgggcattctcgtacagcttttcagaaatattgtaaaaatagtgggacttgcaggcgttatgcttgtgcttgatgttaggcttgctgcgatatcatttgtgctgatgccgcttgtaattgggcttacggtgctgtgccagaaaattgccagaaatatttacaggctttaccgtacgcgcctgacggacatcaatacttttttgtccgagcatctttcggggatgaaaattatacagatatttggcagacaggagcgcaagttcgaggaatttcatgataaaaatacaaagctctacaaggctttttacagggagatgctcatgtatgcggtgttccgtccgcttatctatattctgagcattttgtcactgatgatagtgctgtggttcggaagcagaaatgtgtttgatgagattatttcggttggcactttgtatattttctcgaattacatcaggtcattttttgacccgatacaggagcttgcagagcagttttcaacactgcagtcatcaattgcatcagcagagaagatatttacggttatggatgaggatgaatttattcctgaggtcgaaaatccaaagcagccggataaaatcaccggaaaaattgaatttgaccatgtctggtttgcctacgacggcgaaaactatgtgcttaaggatgtctcatttgtcataaatccgggcgagaaggtggcctttgtcggtgcaaccggagccggaaaatcatctattttaaatcttataggcaggtattatgatatacaaaagggacatatctacattgatggcatcgatatcagacagcttagcaaaaagcagcttcgcagtgcaatcggtcagatgcagcaggatgtgtttatattcgagggggatgtggcgtacaatattcgattaaatgacaatgacattacggatgagcaggtcaaagaagcagcagaatatgtaaacgcctcacactttatcgaaaagcttccacagggctatcacgagccggtcacggagcgtggtgcgaccttctcggcaggagagcgtcagctattgtccttcgcaaggacacttgcccataatccgagcatactggtcatggacgaggcaaccgccaacatagatacagagacagaaattctcatacaggaggcgcttgaaaagctcatggacggcaggacaacaatcatggttgcgcaccgtctgtccactatccagcatgctgactgcatcatggtcatgcacaagggacgtatatgtgagcgcggtacgcacagggagcttctggagcaggatggcatatacaggaagctgtatgagctgcagatatcgtaggtataattagcataagctgcagatattatatgggtaatttataatactggttgtattttgatgaaggcaggggaaggttggagttatagaaaggtgacttgggatggtatggaaaataaacaataactgtcagatttttatagaaaaaacggattccatcgcaggccggcagaaggagataattccacatgtgtctgcctattatgtggataaatacacaactatttcagaaaaaggtgtaaaaacaggcagcaacaggctatgtggcacagcaaatcaggagcttttggcgggatacatgctctacaaatatctggggatatcatcggatgaacagcttgtcagaaatgagcacggcaagccggaaatagctgatagcgggactttttttaatctggcacacagcggcccgtatgtggtgcttgcaatatcggacaggcccgttggcgtggacatagagcagacaaaacgcatgagcttcaaggtggcaaagcgtataatgcgaaaagagcagcttgacaaactcgaaggctttgagaatgaatctgaggcatttcaaattgagcttgcaaaatactggacacagtatgaggctataatgaagcttgtcggtacaggcttttcgggggagctggatgataggacgatggaggcttatgaaaaaagggtagtgtttcgtgagctagaggattatgttattgcagtggtgacaaagtagggattgaaaaaattcttggtttttgttagtatataagcatggattgcgtctatataagtgaaggaaactatttatggaaacataatgatgcagttatatatttaagggggatttgccatgaagaaaattcaattatttttaaagtacttagttttaatgttgtttttaacagtatggattattataatgtttttcaccgattatatgaattcacagtcggttaagctatattgcatgtttgtagtggggtgtggatgtgcatactcaatctgggagaaaacttatgtaccggatgcaaggtcatatattgcagaaaaagcaatagcattaatacttatagtaactgttttcatcagattattatgtttttaataaaaaagtcaaaatacgtaacaggcttttctgttgcgtatttttttgttgtttttttatccatatatgttagaatatagtcaaagcagtttttctatagcaacctgtgcggtcgttggcacattaattacagatatgactatatgctctgtaaatatgtgaggcataataagatgtcgtccggcgataagggcgtgcagggtcttcaataccttaattatttttcatattccctgaaattcttgcttttaaatatttcattacgtgacaggtgatgttgctacaattgcaccgggagttacaattggcgacagagcggttataggaccaaaggcaatggtatataatgatgttgaggagggccaggaacaatgctaaacatgaacaacgaagaggctttggccattatttttgcaaacagttatgatgccctcattcctgagatggtatccgagagacttatggcttccattccgtttgcgggtcgttacagactctgcgatttcctgatttcaagcatggtacatagcggaatagacaatatatctctcatagttaagaaaaattatcactctctgatggaccacctgggctcaggtcaggagtttgatctagcaagaaaaaatggtggtatcaatatagttccgccttatgcacagaagcagattaaggtgtatgagggccgtgttgaggcaatcgaaagccttaagggctatctgagaaagtgtactcagaagtatgttatcatggctgatgccaactatgtattcaattttgatttcagggagctgattgaggcacataagaacacaggggctgatatcactgcaatgtaccgcaagcaggaggtaccgaaggtattcctaagaccaaacggcaacaatgatgagatgtactatacatttgatatagatgatggacgtatcaaaaagatatatatcaatgccatggatatgggcaaggtaaactttggcatgaatatctatatcatggagaaggagaagctcattagaatagtggatgacgcttttgtacatggttattcttattttacaagggatctgatggctgcaaacactgattcactcaatatccaggcatatgagtacacaggctatgcttcacagattacagatatgaagagctatttcgaggagaatatgaagcttcttgatgaggataacagggaagcattgtttaagagtggcaattctatctatacaaagatcagggatgataaccctacaagatacataaatggctcaaaagccaagaatgttatggttgctgatggctgtgtcatcgagggtaccgtggaaaacagcatcctatcaagaggcgtcaagataggaaagaatgcaaaggtcaagaactgcatcctgctacaggatacggtaattgaggatggcgccaatctggagtacgtgatcacagacaagaatgttcgcgtatcaagaaatagatcacttacgggaaatgactcattccaggtttacgtggcaaagggacagaccgtatagccggttaaggaggaacatggacatggcagagaatagaaacacaataaatatcaaatcagatgagtctggcgagatcaaggtagcagatgaggttgtagctatcatagcaggtcttgctgccactgaggttgagggagtaagctccatggcaggcaatatcacaaacgagattgtcagcaggctcggtatgaagaatctctcaaagggaattcagattgagatagcagacaatgaggtagtggttgatgtagcactcaatattgcttatggatacagcatccctgaggtttctacaaaggtacaggagaaggttaagtctgcaattgagacaatgacagggctttctgtggctactatcaatgttcgtatagcaagtgttgatatgggagagaattaaatagttctttttaaatgatcacaaatgtagtataattaaggatgtcgtacagacatccttaatttatataaaatattattcacgagaggaatttaaatgacaagaagcaagataagagaaaacgtttttaagatgcttttcagggttgagtttcatgacaagtctgagcttgcagagcagatggagcttttaaatgatgagcttacaaatcctacagacgaggaaagacagtatattgatgaaaaatgcagtgcgattattgagcatatggcagagcttgatgcactcatcgatgagaagtctacaggctggaagaccaatcgtatggcaaaggttgatctggcaattatcagattggcagtttatgagataaagtttgaggacgatattcctacaaaggtttcaataaatgaggctgttgagcttgcaaagaagtatggtgcagatgagtcaggtgcatttgtaaacggagtgcttgcaaagtttgcatagcttaagaggaacagcgatatagagcattgaacatggcaaatagaaatatatattcggtagcgcaagtaaatagctatattaaaaatatgttcgctcaggattttatgctcagacaggtgagtataaagggagaggtgagcaactgcaagtatcacacgagcggtcatatttatttcacaataaaggacgcgggagcagccatgaacgctattatgtttgctggcagcagggcggcaggactttccttccacatgaaggagggggaccaggttattgtgacaggttccgttgaggtgtatgagaagaccggcgcatatcagctttatgccaaaaagatagagcttgacggagagggcaatctgtatctcaaattcgagcagctaaagcatgagcttgaggagatgggcatgtttgccgcagagtacaagcagcctattccgcagtatgccggccgtattggcgtggttacagcaccgacaggcgcggccgtgcaggatataaggaatgtatcatcgcgcaggaatccatatgtacaagtcatactttatccggcacttgtgcagggagagggtgcggctaatagcatagtgaagggcatacagacattggatgcgatgaatcttgatgtgataatagtcggcagaggcggaggctccatagaggatttatgggcctttaatgaggagattgtggcgagagccatatttgactgccgcacgccaatcatctcggcagtaggtcatgagacagactggacgatagcggattttgtgtcagacaggagagcacccacaccttcagcggctgcagagcttgcagtcagtgactacagacagacgttagagcgccttgacaatctgcgccgcaggatggacagaaatctgacaggccggattgattttttcagggaaaagctgtcacatattaaaacaagacttaatttccttagtccacagaataaactaaatgagaataaaaggcgtctggcagatatcgaggatgcacttgaaaggattatgaagcagaggctttcggattgcagacagcgtctggcactgctttcaggtacactggatgcatattcaccggccaaaaagctggcacagggctatgcgtatgtcgaggtggaaaagaagggggcactgcacagtgtatccgatatcaatgcaggcgatgacataaatatatatctgatagacggtcatgcaagggccgtagtttcggaggttattaacgatgaacaaagaaaatgaaaaaacactgacactcgaggagcgatttgcacacttagagcagatagtggcgaggatggagaatgcggatgtatccctggatgaggcctttgagctctacaagaaggggcttgatgaggtaaagagtgccaatgatatggtacagggcatggaaaaggccatgcttgtgctaaacagcgacggacaactggaggaattctgatgagcttaaatgggaatttaaataagtcacaatttatggaagagctgcagcaaaaggtagagcatataaataacgtgcttgagaagtttcttcccgctgaggagggacagcagaggattatttttgaggccatgaactatagtgtgagagccggtggaaagaggcttcgccctatgctcatggaagagacttaccatatgtttggcggaagcagtgcagtgattgagccatttatggcggcaatcgagatgatacacacctactcactggtgcatgatgacctgcctgccatggacaatgatgagtacaggcgtggaaagaagaccacacatgctgtgtacggtgaggctatgggcattcttgcaggtgatgcacttttaaacctggcatatgagaccgcagcaaaggcttttggcatggaagttgctgatgcgcgtgtagcaaaggcatttgcggtgcttacaaaaaaagcaggcgtgtatggcatggtcggaggacaggtggtcgatgtggaaagcgagaaatccgatgactgtcctatcacaagggaaaagcttgactttatctacaggcttaagaccggcgcacttatagagagctcgatgatgataggagcaatccttgcgggagcatcgtctgatgagatatcacgcgtggagcagatagcggcaaagctggggcttgcgtttcagatacaggatgatgtgctcgatgtcacaagctcgcttgaggtgcttggaaagccggtaggcagtgacgagaaaaataataaagcgacatatgtcacatttgagggattggataaggcggtttctaatgtggagcgcatctctaaggaggcagaaaagctgcttgatgatttgggatacgacgatgcatttcttaaggagttatttgaatatctgatccatcgggagaaataagatggttttagaaaagatacaaaaggaaaatgatataaaaaaactgacacctgaggagcttgagcagttaaaggatgaaatcaggcagtttcttatagagagcatatcggtgacaggaggtcatctggcatcaaacctcggagtagtggagcttaccatggcgttacatctgtgctttgatctgccgaaggataagatagtgtgggatgtagggcatcagtcgtacacacacaagatactcacaggcagaaaggatgggttttcatcgctcagacagtatggcggcatgagcggcttcccgaaggcagaggagagcgactgtgactgctttaacacgggacacagctccacatctatttcagcaggacttggacttgcaacagccagacaggtgactggagatgattatcatgtggtttctgtaataggagacggtgcactgaccggaggcatggcgtatgaggcgctcaacaatgcttcaagcgtgaagggcaatttcattatagtgctaaacgacaacaatatgtcgatttcagagaacgtcggaggcatcagccagtatctttcgggctttcgcacagcggatgcatacagggatttaaagaataatgtcatgaattccctaaaccatataccaatctacggagagcgcatggtaaagcatatcaggaatacaaagagtagcataaagcagctttttattccgggtatgttctttgaggagatgggcatcatctatttaggtcctgtggatggcagtgatataaaggaaatgtgccgtgtgtttgatgaggcaaagcgtgtggatggtccggtgcttgtgcatgtgctcacgaaaaagggggcaggctatggtccggcagagcgttatccatccagatttcacggtgcggagccgtttgtcatagagacagggcttccaaagaataagcgtacgaaggccaattacactgatgttttctcaacagtcatgaagaagctgggcgagagaaatgaaaaggtggttgcgataacggctgccatggcagatggaacaggacttcgcagattccaccgcaatttcccggaaaggttttttgatgtgggaatagccgaggcacatgccacgacctttgcggcaggtcttgcaaagtcaggccttatcccggtttttgctgcatactcgtcatttttacaaagagcgtttgaccagatacttcatgatgtgtgcatacagaatctgcatgtcatctttgcaatcgacagggcagggcttgtaggcagtgacggagagacgcatcagggtatatttgacatatcatacctgtcggttatcccgaatatgacaatcatggctccgaagaataagtgggagctgtccgatatgatgaaatttgcggtggcatatgacggtccgattgcactcagatacccaaggggtacagcctatgacggtctcaaggaaatcagacagccggtagagcttgcaaagagtgagcttatcaaaaaaggaagcagggtggctatcatggcactcggcagtatggtaaagactgctgttgacgcggtaaagctgcttgaggcagagggaatttctgctacacttatcaatgcgcgttttgcaatgccttttgataaggaagcaataaaggagctgccggctgaacacagcctgcttgtgaccatggaggaaaacgtgcaaagcggcggctttggtgagcatgtgacggagtatgtcaagactaacggcattgctcttgaggtgctaaatattgcacttcctgactgctatgtggagcatggcaatgtcgaggtgctcaaaaaggagctgcatgtggatgccgaatcggtggctaagcgcataatagcagcattatagatagaggtaacatacagtatgaaagaaagattagacgtattacttgtaaacagaggccttgcaccatcaagggaaaaagcaaagaccatgattatggagggcaatgtttttgtaaataacaaccgtgaggataaggccgggagcacattccccgatgactgcaatatagagattcatggaaagacactgcagtatgtgagccgtggagggctaaagcttgaaaaggctatgaagcactttgatatcacgatggatggcaaggtgtgcatggatataggtgcatcaacaggcggttttacagattgtatgcttcaaaatggtgctaaaaaggtgtatgccgtggatgtcggatatggccagtttgcatggaagctgcgtcaggatgagcgcgtggtgtgcatggaaaagaccaatatcaggtatgtgacgcccaatgacatagatgatgagctggattttgcatcggttgatgtgtcattcatatcacttaccaaggtgttaggtcctgcaagagcactgttaaaggacggtggcgagatggtttgtcttatcaagccacagtttgaggcaggcagggaaaaggtaggtaaaaagggagtggtccgtgacaagagcgtgcatgaggaggtagtgaacaatatcatatcctttgcactttcaaatggatttagtgtgttagaccttgagtattcgccaatcaagggacctgagggcaatatagagtacctcgtacatataaaaaagacagatgatcctataaaggaggaatcagtggatattcatagtgtggtcgaggccgcgcatggagagctggacaggaaatagactatgaaacattttgttgtgatagcaaatgcctataaggacagggattttgcacttacaaataaaatagtggcatacatagagcaaaagggcggcacggcaaagggtcttatgagcaatgtcgaggctatatccgataacgagtttgagcttgaggatataccacaggatacgcagtgtattcttgtgctcggcggagatggtacactgattcgtgcagctacaagggtggagacacttgagattccgcttatgggagtaaatctcggcacactcggctatctgtgtgaggtggaggaagctacggtatttgacgctattgattcgctcatggctgataaatacatgacagaggaccgtattatgctcacagggcataaaagaggcagtgagacctcgagagttgcattaaatgatatagtcatccatagaaagggcaatttgcagatattaagcctcaatgtgtatgtaaacggtgagtttttaaacaattaccatgccgacggcatcattgttgcgactccaacaggctctacaggctacagtatgtcggcgggaggtccgattgtggatccgaagggcgatatgatactgctcacaccgaataatgctcacaatcttacgtcaaagagcattgtgctttcaggcgatgatgagatagagatagagattctaagccgcagggagcaaaacgatgagatggcgtgtgtcagctatgatggcgataccacggcagagctggctgtgggagaccgttttgttatttcaaaggcagccaatcatacaaagatctgcaagctccaccagagaagctttttggagatactccgcaaaaagatgggaaattattcataacacagataaggattgttataatgaatagttacaaataatatttatgaggtgacaggacatgaaaacaaacagacaatccaagataattgagataatccaaaagaatgaggtagagacgcaggatgagctctctgcgcttcttgaaaaagatggttttcgcgtgactcaggccacagtatccagggatatcagggagcttaagctcacgaaaatccctaccgcaagcggcagacagaagtacgccgtgataacggatgcacctgagaatctctcaaagaaatacgaaagagtactcagagagggctttttgtcaatggatatggcgcagaatatcctcgttataaagactgtatcgggaatggcaagcgctgtctgtgctgcaatagatgccatgaagatgagagaaatcgtcggttcgattgcaggagatgacacaatcatgtgtgcaatccggactgttgatgatacatatgcggtgatgaaaaaaatccgcagaattgtggaatgatgttaccggaaaataacatatatcgtcatgcctgggagaggaaggataaaatatgttacaaaatctacatgtaaagaatctggcactcatagacgagtgcgaggttgagttttccgacggactaaatatactgtcgggagagaccggagcaggaaaatcaatcataataggctctatcaatctggcacttggtgaaaaagtgcaaaaggagatgctaagagacaatgaaaagcctgcttttgtggagctgattttttcggttgaggacccaaagattatagaggccctaagggagcttgatgtggaggtcgaggacggatgcgtgattttaagccgtaaaatcacacagtcgcgcgctgtcggcagggtgaacggcgaggccgtatctgtttcgcgaatgaaggaaatagcctcatatctcatagatatccatggtcagcacgagcatcagtcacttttatcaaagaaaaagcatcttgatatacttgatgagtacgcaaagcagtcgcttggcgataaaaagcagcagctttttgcctcatacaaagcatacagggcgcttaatgatgagtatgaaaagtccaatatcgacaacgaagatagaagtcgtgagctgtcattcttagagtacgaggtgaaggagattgaagaagcagcacttgtgccgggtgaggatgaggagcttgaggcgcagtttaggaagttttcaaacggaaagaaaatcatggagggcgtaaatgctgcatactctgccacaggaggagagatggagagcgcatcagagcttattggcagggcagtaagagagctgtcacaggtatcaggctatgatgaggatgtggaagccctggagaatcagctgtcagagatagacagtctgctttctgatttcaatcacgagatatcaggatatatatcacaggctgagtttgacgaggagaccttctatgagacacaaaagcgtcttgatgagataaatcatctaaagagcaaatacggcagctcaattgacgatatactgatagcactcaatgaaaagagggagcgtatcagtgtcctgaatgattatgattcctatttacagaaattagagcagcagcttgcgaaaaaggaaaaggagctgtcacagatatcggatgaggtatcagaaatcagacaaaggagtgctgtaaagcttgtatcagaaattaaatcagcacttaatgatttgaatttccttgatgtacagtttgatatgcagtttgacagattgccggactatacggcaaacggcatcgatgcgccggagtttctcatatcaactaaccccggagagccgcttaagccgctcggcagggtagcttcaggcggagagctgtcgcgtatcatgcttggcatcaagacaatcatggcagaaaatgaccacattgagtcgcttattttcgatgagattgattctggaatcagtggacgtacagctcagatggtctctgagaagatgaatgagcttggtcgcaaccatcagattatatgtatcacacatctgccacagatagcagctatggcagatgcacatttccttattgaaaaagcagttgagaacaaatccacggtttcaaggattcgaaggctaacagacaatgacagcgtggctgagcttgccagaatgctcggcggtgcaaaaatcacagataccgtgatggagagcgcacgcgagatgaaagagcttgccatggagaaaaaagcactatcataaatattatgtggaaggtgtcgaggtcatcattggtggcggtatatgccatgatggaaaacacataaactgtcaaactatattcgattacgaataaaagaaaaatgacagacgcatactaatccaaatggaggtaatagtatgcggaagttttttggaaaatttgtgagtgtcacgctggctgcagtagtgatagctatgtttgcactaagcagtgatgataagtggtgcagcagggtagataaggcatttgatgaaagtgcattaggaagttttttaaatgaatcaaaggccggatatggaagatatgcgacagggcttccaggacagacggccagtgtattggctgattctggtgaaaacggcggaaacggtgaaaacagcggaaccgaacaagacataggacagacagcagatacagcatcaactcacagagctactgacagagattatgaagagacaggtaaaataagtgatggaataagtgttgagggcgtatatgcctgtggcaggctgacaggcatatatgagcagacagagggcgtgcttgtagtgaatacgacggaggtgacagacgaggatggcaaaaaagtcaatcctgcagataaaaaggtgcagtgcggtgattatatcctatctgtcaatgggcgcactgtggcagacaaggaggagctttctgaagcggtgaatgacataatgaaggaatatgatgaaagcctggatgaaagcctaaaagataaaagaacggtaagcatcaaatttcttagaggcggtgaagaaatgtcagcggatatcgcgcctgtcaggatggacgatggcagatactatatgggaatatgggtgaaggacgatctggcgggaatcggtactatcacttattatacaaaggacggccgttttggcgcgctggggcatggaataggagacggaacacaaagcggcaatctgttgtatgcaaacagcggtgatttgtacagcatgaagcttaccaaaatcaaaaagggaaaggcaggcacgccgggagagataggcggagtggtgtattttggcaaaaaaagccacataggcacacttgactgcaatagtaatctgggaatttacggacagcttgacagtgatgaattgtcggaatatgccgcagaggatacgtattatccggttgcagacaaggatgagatacacacaggcagtgcacagatgatatcggaaatatcgggaaaactggaaaaatataatctggaaataacaaatatagacaaaaaggcgacagataccaacaagggaatggagcttaaggtgacagacgaaaggctgatagagctttccggtggaatagtgcagggcacatccggaagccctatcatacaggatggcaaaataataggagcagtcacccatgtgtttgtcgatgatccgacaggaggctacggcatctgtattgatgagatgctgtaattactgctccatcctgcgaagctccggcagtactgtactaagcatggttacaaagcagatgcttccgccgatcacgtttgatacaggctctgccataaacacaccgtccgttcccatgccaaaggagtaaggcaggatatatgtcagcggtacgacgatgaacaccttgcgaagcagggagaaaaatatagccctcttctttttattcagtgatttgaaggtggtctgtccaacgtactgcagatccataaatatgaatgccgcaaagtagatatttaaagccttcaccgcatcatccataagggtggcatcggagctgaaaatagcaatcagggcatgaggagcaagtatgatcacactccacatgacagctgtatatagaagcacgagcagtcccatagtgaaaatggattttctcacccgggccggccttttggcgccatagttgtagcttaaaacaggagatgaaccctccactattgcataaattggagtctcgaccatctgcctgatgcttgatacgatggtcattaccgatatgtacaaatcgccaccggtcactgaaagcacgttgttgcagcatatagataccaagctgtttgtgagctgcatgacacagccggaggttccaaggcttatgatgtcctttgcatagcgcgtattttcaccaaattcagagagtgtcataaggcgcaccttaagctcagcctttttcctaagaaagtgaagcacatagagagcagacagtatttgtgagatgaccgtagcaatagctgctcctttgatgccaaaattaaatccaaatataaaaagcgggtctaaaaccagattggcaacggctccgattgccacagacagcatgccggtagtggagtagccctgagcgttgataaagggattcatgcctgttgaaatcatggatgggagtgttccaagcagataaatgagcaggtatgggagtgcatatttaagggcattttcagatgcaccaaagagtattaaaaggggctttgcaaaaatcatgcacaaagctgtaaaaatgactgcaaatgtgcagaccattgtaaagctggtattcattatagtatttgcggccctgtcatcacccatgcctctttttattgaaaaaagcggagcgccgccgcttccaaagagatttgagaaagcgattgtcagcattataataggaaagcagagccccacagcaccgagtgcagtagttccgacatcaggtatgcgggcgatgtatatgcggtccactatgttgtacaacaggcttagaatctgtgctacaagcatgggcagagcagcctgcaatatgtttttctttatcgaatcgttatcaaaatctatttttttcataaggtacctcttttggatttgcttcgttcattatatcaccacatataaaaaaatcaaaggctcagcctgttttgatatagattatatttatgacaaactaaaagaaaaatatattttacaatgacaaaaaactacagtaatatatggactataaaattacgaattcttaaataaccatatataccggaggataacatgaagattacacagatacatacaaataaaccacagtcactttcttttgagatttttccaccaaagaaggaggaggactttaaaaatattgacgagatgcttgagatactctgtgattgtcatcctgagtacatcagcgtgacatttggtgcaggcggcagctcaaacaataacaagactattgaaattgcaaagaagataaagaaccagtaccatgtggagccggtcgtgcatcttacatgtctgtgctataacaaggcagagatagatgagtttaccagacagctttcatatgaaggaatcgagaatatcctggcattaagaggagacagaaatccaaatgtgcctgcaaaggaggattttctccatgcaagcgatttgattaaatacataaaggacaccacaggtgatcagttctgtatcgcaggtgcgtgctacccggacatccatccggaggcagctgataaggtagatgatattaagaatcttaagaaaaaggttgatgccggtgcagagcttcttttatcgcagctcttctttgacaatgataccttcttcaattttgctgaggactgcaggcttgcaggtatcaatgtgccggttatcccgggcatcatgccttgtatcaatgcggctcagattcagagaatggtcacaatgtgcggtgctaagttccctgagaagttccagaagattgtgcacagatacggagacaacaaggaggcactttttgatgccggaatgtcttactgcgagagtcagataattgagcttttagctaatgatgtggagggaattcatctttacactatgaacaatgtgagagttgcaaagcgtttaacagagggaatcaagaaccttatttaggacaatagtacggaacgtaggccctgggtaccactggcgcacacgtattcccgccgtcgctacgctaccaaactgtaaattcgaataaaaaatatcaaccgttgcaaaaagtactctagatgattataataggtatattagatttgtaaatggaaacaatgtccatattaaatcgaaattaaattatataatatattaaggagacagtataaaaatgaaagaaaaatcaagaagcactttttccggcaacattgggttcgttcttgcggcagccggcagtgcggtaggacttggaaatatatggaggtttccgtatctggcagcaaaggacggaggaggactttttctgctggtgtatctgatacttgttctgacttttggctttgcattgcttaccactgagattgcaataggccgtaagaccggacagggaccgctcaccgcgtatggtcttatcaatccaaagggcaagtttatcggtgtccttgcgtgtatagtaccggctattattctgccttactactgtactataggtggatgggttttaaagtattttacaattttcattacaggaagcggtaagaatgcggttgcggatggatatttcacaggttttatcacaggccagtgggcaccaatcatattcggagtggtttatctgcttttaacagcagcaattgtcattggtggagtcaataaaggcatcgagcggttcagcaaggtgcttatgcctatccttgttgtgcttatttttgcaatcggaattttctcactgacgcttcattataaggatgcgtcgggcacagtaagaagtggtcttgagggacttaagatttatgtgattccggatttcaaggggcttacaatgcaaaagcttttcaccgtatttgttgatgcgctcggtcagcttttttattcaatcagtgtagctatgggaatcatggttgcatatggttcgtatgtcaagaaggaatcaaagctcatgggctcaatcaaccagatcgagatttttgatacacttgttgcattccttgcaggtcttatgatcattccggcagtatatgtatttatgggccgtgacggcatgtcagcaggaccggggcttatgtttatatcattgccaaaggtatttaatgaaatgggaatagcaggagatattgttggactgatattcttcatgatagttgcattcgcagcagtcacatcgtctgtatcaattatggaggctattgtatcgagtcttatagacagatttcattggagccgcagaaaaagcgcaattttagtcacggtatacgccctgattgcagagataatagtctgccttggctacaataagctctatatggaggttaagcttccaaacggcacagtcggacagatacttgatataatggactatgtaagcaataatgtactcatgccaatcgttgcacttgctacatgtatcctcatcggctggattgtaagtccaaaggtgataatagatgaggtgacacgaggaggcagtaaattcaccagaaaagggctttatataatcatggttaaatttattgcaccggcattcctgcttatattattgctgcaggcactcggaatcattactttttagaattgaattaaatttattgtatattttatataaatacccctgaaaatgctgtaattaaagaccaagtaaaattattcaacatctctccagatgctggtaatgtcaaacttacagcaacattatatgatgaggaaactgtaaaaaaatggcttgtgagctaatattgtagtgaaatgtaaattagaggaagcaatctttgggcgagaactcggaggatgcttcctcttttgttgataattgcaggcattggcagtaggacggggcttcagcccatgagccctggcttatgcacactctctctcgtgagctacgctacgcagcaagatactgtaggaatgatgcattatagctttacgatgccaatctacttgaaggagatgaaggacttgtagatctggattagcatttaccacattgggtcaggcaccaatgtggtcaaaatagcgtcaacttaagcaaaaataaggcataatcatggcgcacataatttgatattcaacagggaaatttatcagaaaccatatcgaaatttttgtttgagctgtctgcagttattccaatctcatcatcagcctgatttttaatcaatgatgataggttggagaggagccagcggtagaaatataattcgctgaacattttctgtgtaattgacttatcaaaaaggttcgttgcaagatattctttcttgccatcaggaagtgtaatttcaataacacgggtatcaatgtcttttgtaccatccttggattgttcgtgaagaattgtacaaatatcaccggaacactttttagcaatattatagttattttttagtctcatgagacatgtgtgtccatgctccacgcagtatcgaaacagcttttcagagtaatatccgcggtcaaaaataatgacactgttctggtaaatattcagagcttcaaggcttttaagatgctcaatggcgaaaatatgataaccattccactttttgcgtgaggtgagggaatcaagttgtaaaattgatcaactgaaagataaaaaagttctttaaaaagatcaggactgataaactgccgggctttagaaacaggcaccccccacaacagtaatataatggtacctgacaccggcaattttttgtagcgaaaattgtgatactgagagaacagaatgtaaagacagtgagaataatatgacacctgaagtaatagccgtgatgaaaatgacgatgcttaaggctggtctttccatggtatttatgagctcgcttgtcaatataggctcgctgacactgcagaccgccataaactgactgggacaggatattatagtagctcacacagctgccagaaagatatcggagatattcatggtcatgtttaccgtgtttggacagacaaatcataaaatacattgattttcctaatgacaaaagaatatccctatgttacaatttactcaaagcattatatttctgtaagcggcaccacatgacagtttttttacaggtgcacaccactttgaagagggcagaccacttcgcattattctacaaaggacatggaagttttcgatgctttaattaccaatcaacagcaggaaaattgaaatgccgtatgtagacagaatgcagaaaatatagtaagaaatagataaatgcagtcaaaaaaggcagatgaaatgtatacagagtgtaaacataaagaaggacagcacatgtatacttcataaattgtaccattgtacgctcattggcatcaaattttcctgctcacacaagagaacaggaggagaaggattgagcgcaaaggactcaatggcaaaggaatactttgcagacaatgccagatttgcggatctgtgcaacaatatactgtatggaggaagagaggtcattcggccggaaaaccttaaggaaagggacaccacggaggtactgaccgcgctagggcttgataaaaagaccatagcgatgcagaagctgagggatatcttcaaaaatgccagcatcaaatataccggcaaatcatatgtcgtactgataggagtagaaaatcagtcggatatacactatgccatacctgtaaaaaacatgttttatgatgtgatggcatacggcaatcaggtaaaggaaacagcaaaaaagcaccgaaaggataaggatactacaacatcagatgaatttctctcgggatttacgaaagaggataagctgattcctgtaattacgattacagtgtatctcggaacaaaagaatgggatggtccaaggaagctgtcagatatgtttggtgatgtggatgaggagcttttgccattcataccggattacaggattaatctgctggcaccgagggagataacagattttacaggattcaggacatccatcaggcagcttttcgaggtactgaagaatgcgtatgataaggaaaaaatgcaggaagtgctgcagaatgacgaaaagtttagtagggtggacagagagacagtcgaggcaatcaacctgtttgcaggaacggatatagacatagatgagaaagacgaggtgattgatatgtgtaaggcgtgggaagaacagaaaaatgaaggcagagagttaggcagagaagaaggcagagagttaggcagagaagaaggcagagagttaggcagagaagaaggcagagaagaaggcagaattcgtcaggcaaaagtaactgctttaaaacttcagaaaaaaggtcactcaatagaagatatagctgaatgtgtggattttgatgaggaaactgtaaaaaaatggcttgtgagctaatattgtagtgaaatgtaaattagaggaagcaatctttgggcgagaactcggaggttgcttcctcttttattgagataattgcaggcattagcagtaggacggggcttcagcccatgagcctgtatggtctctgtttttttactgtttctttatactttctttattgaattatccacgctaattgataaaataaatagtatgcgcacgattgcggatatttttttgcattcgtggatgggggataaattaaccggaaagaaaggaaacgtttatgagtaaaattttcaagaatctgattccatactggcgatggatcatattaatttttgtttttctcattgctcaggcttactgtgatctggctttgcctgcgtacacatctgacatcattgatgttggtatccaggatcatggcattgagcatatcctgccaaaggagattacatcggaggattatcagatggcacagacatttatgctgtctgacgagaaagaaaaatttacggactgttatgaggcagaggatgcttcaaaatctgatgacggtgtggcaaaatacaagctgacagctgattcggacacacttgataagctggatgaggagcttttggttcctcttgtcatggcatatcaggcttttcagtcgggtgagcagatggatgtggatgcatcggctatcccgcagggagtagcgctcgatgataacatgataaagcagataagaagcaaggtgcaggaaaaaatcgatgcggtgggttcagctactttaaagtccatgggtgtaacttttgcgacaaagtgtgatgagaatgcaggaatcgacgtggatgccaatcaggttgcttatctgtggaaggcaggagccaagatggcagcctttgcagcaattatgcttatagcagcatgtgttgtaggttttgcggcttcaaaggtcggtgccgctgtcggcagggatttgagggagaagaccttttcaaaggttgtaggtttttcaaatgccgagattaacaaattctctacggcatcactgattacgagaagcacgaacgatatacagcagattcagatggttactactatgatgcttcgtatggtgctttacgcgccaatcgttggtatcggtggtatcatcaaggtggcgcagaccaaatccggcatggagtgggtgattgccattgcggttgctgccatcatggtttttattttcacactggttggcattgctatgccaaagttcaagattatgcagagtcttgtagacaaggtaaaccttgtttctcgtgagattcttacaggtctttccgttatcagggctttcggccgtgaaaaggaggaggaaaagaggtttgatgaggctaaccgtgagcttacacgcacacagctgtttacaaaccgtgtcatgacctttatgatgccgggtatgtccatgatcatgtactgcatcacacttggtatcgtgtgggttgcagcaggcagaatagacaagggttctatgcaggtaggtaccatgactgcgtttattacatatgccatgatgattgttatgtcattcctcatgctttcagccatgtccatcatgcttccgagagctggtgttgcggcagagcgtatcgatgaggttataaagacaaacagcactgtaaatgatccaaaagagcctgttactgaggctgatcacagaggtgttatccgtttcaaccatgtggatttcagatatccgggagcaaaggaggatgtgctttcagacattgattttgtggcggagccgggcaaaaccacagctatcatcggaagtaccggctgtggaaagtctacacttgtaaacctgattccgcgtttctatgacgtgactggaggctcaatagagcttgatggacacgatatcagagactacacactaagcgagcttcgcgagtcaataggctttgttccgcagaagggtattcttttttcgggaaccatcgcctcaaacctgcgctttggtaaagcagacgcgagtgatgagcagataaaaaaggctgcggatatcgcacaggcttctgagtttatcgagacaaagaatgacaggtatgaaagctcaatcgcacagggcggctcaaacgtgtcaggtggtcagaagcagaggcttgccatagcaagagctatcgcaaaggaccctcatatctatgtgtttgatgacagcttttcagcactcgatatgaagactgacgcgcgtctgcgtgcagccttagcagaggttacagagaatgcttccgtcattatcgtggcacagcgtatcagcacgattattcatgctgaccagattctcgtgctcgatgacggtaaaatcgtaggaaaaggcacccacgaggagcttcttaaaaattgcgatgtatatatgcagattgcacagtcacagctttcagccaaggaacttggaattgatgataacaaaaaggagggcatgtaagatgagtgagaataataacgaacagtttaagatgcctcctaagaggccaagagggccaatgggacgtggccccggaatggtcacagaaaaggccagggatttcaagggctctacaaagaagctcataaagtatctcggcagatactgggctgctatcattgcagttatgatttttgcagcagtttcgactgtcttctccgttgcaggaccgaaggtcatgggtaaagccaccactgcgcttgccgagggactcatgaacaagattgcgggaacaggcggcatagattttgattatattgcaaaggttcttttgtttacgctggctttatatgtggtgagtgccatctttatgtttgtccaggggcttatcatgacaggcatcacgcagaagacctgctataggatgcgtaaggacatcacgagcaaaatcaaccgtatgccgatgaagtatttcgagtcaaggacatacggtgaggtactttcgcgtatcacaaacgacgtggacacactcggacagagcttgaaccagagtatcacacagattattacatctgttgccactttggtcggtacactggtcatgatgctgtctatttcaccgctcatgacgctgatttcactcgttatcctgccagtttcgatgatacttatttcgtttgtcataaagcattcacagaaatacttcagacagcagcaggagtatctgggacacataaacggacaggtcgaggaggtgtacggaggccacctcgtcataaaggcatataataaagaggcagagactgtaaagacctttaaggaggccaacaatgtgctctacaaatccgcatggaaatcacagttcctttcaggacttatgatgcctatcatgcagtttgtaggaaacttaggatatgcgggagtagccatctcaggtggtatacttgccataaagaatgtcatcacaatcggtgatatccaggcatttatacagtatgtgaagaatttcacacagcctatccagcagatagcgcaggtggcaaaccagcttcagtcgatggcggctgcatctgagcgtgtatttgagttcctcgatgaggaggaagaggatataacagtggaaaatcctgtaaagctagaccatatcgagggaagtgtagagttttcgcatgtacactttggttataatcctgaccagatcatcatcaatgatttttctgcacaggtaaagccgggacagcaggttgctatcgttggaccgacaggagcgggaaagactaccatggtcaagcttcttatgagattttatgatgtaagctcaggcgccattcttgtagacggacatgatatcagggattacaacagagccgatctgcgagatgcattcggcatggtattgcaggacacatggctctttaagggcaccattatggaaaatatccgctacggccgtctggatgccacagatgaggaggtcatcgcggcagcaaaggcagcacatgcccatcactttatccagacactgccgggtggctacgatatggagctcaatgaggatgcttcaaatgtgtcacagggacaaaagcagcttttgacaatagcaagagctatccttgcagacaatccaatccttatccttgatgaggccacatcctctgtcgatacacgtacagaaatccgtatccagaaggcacttgacaatctgatgaggggcagaacaagctttgtcatcgcccacaggctgtctactatcaagaatgcagatatgattcttgtcatgaaggacggagacattatcgagcagggtacacatgatgagcttcttgcaaagaacggattttatgcagagctgtataactctcagtttgaagaatagagaaagcacgggtatcgtgcagttttgcgaatatgcgtggggctgaatggttacataaaatttaaaaaaaaatacgctctcgacaaaattcgacaaaatgtgttatcataaaagcataaaatttgttttgacatgacagtaattggcggcataggagagtttgatgagcactttaaatgtcgcagtagcagacgaaaagaaaaatatgcagagtttattaaagggcatggagtttttaggaacagcaaagagtagtgatgaagcatacagcatgataaacggtaatgccggttctgatgtgatacttgtgtatgtaaagagagcatccggtgacactgagccacttgatgatacatatatggagaaaaaatcccttgagacacaggtgacggatatcattcatgagataggtgttccggctcatataaaggggtatcagtatcttaggactgcgatagtgatgtgcgtggaggatatggagatgcttagctctatcacaaagcttttgtaccccactattgcaaagaagtacaagactacctccagcagggtggagagagccataagacatgccatcgaggtggcatggagcagaggcaggatggatacgatagactccatgtttggatacactgtaaactatggcaagggcaagccgactaattcggagtttattgccctgataacagataaaatacgtcttggaatgtagatttgcagcttaaacagcacaaaaatcgtcattatagacaaataaaaccatattttaacaaattaactaggcaaaatgtactcccgcgtgatataatatggtatacattctattggttttaggatgtatactatattttttatcagattaatcgttgtttaaataactgtaatctgggggaggtttcagcatggacaaaattaaaatattaatggccgcatcagaggcaataccttatatgaagacaggtggacttgctgacgtagtgggatctttaccaaaatattttgacaaggacagatatgacgtgagagttatacttccgaagtacaaatgtatggatgataaattactgccacagcttaagttcgtctgtcatttttatgtcaatctcaactggcgtaggcagtatgtggggatttttacatcgcagtatgatggtgtgacatattattttgtggacaatgagttttactttgcaggagataagccatacaacaatatatacgaggatgtggagaagtttgctttcttttcaaaggcggtgcttgaggctttgccggttatagattttgccccggatgtgatacattgtaatgattggcagacaggactcttgccggtttttctaaagactgtgtacggctcagacaatttctatgccggtatcaagacagtctttaccattcacaatatgaagtttcaagggcgttggaagattaaagaggtggctgatgttacaggacttccggagcatatttttaattcaggggagctggagttctatggtgaggctaattatttaaagggcggcatagtatatgcagatgagattacgactgtcagtccgacatatgcagatgaaatctgtacacctgagggcggagagggcctggatggcctgatgcttgagcggcgtaggcatttgagaggcattgtaaacggtatagattatgatgtctttaatcctatgaaggatacatatctggataagcatttttctgtaagggaattgagtggaaaggtcgttaataagcgtcagctgcaggagaagtatggtctggctgtggataatgatgtcatgctgattggaatagtttcgcgtctgacaaatcagaagggctttgatctggtggcatatgtgatggaggagatgctttccaccatgaatgtacagtttatagtgcagggtacaggagagcagcagtacgaggagatgtttaattatttccatggaaggtatccgcagaagcttggagtatatatcggctactcggaggaaaatgcacatgagatatatgcaggctgtgacgcatttctcatgccgtctctttttgagccgtgcggcttgagccagctcatgtctatgcgatatggtacgctgcctatagtcagggagaccggtggtcttaaggacactgtagtgccgtacaatgagtacgagaatacgggcgatggcttttcctttgctaattataatgcgcatgatatgctgcatgttatcaaatatgctcttgatgtgtttgaaaaccataaggacagatggcaggagatgatgcagcgcgccatgaggcatgatttctcatggaaggcatctgcgaaagagtatgagaagctttacgacatgctgcttggcaactagtacatcattctgaaaataacaggccaataattttcatgaatttccaactatgttcttagaaagtaaaataccggatacatatctatgatatgatatccggtattttgtgttatcgggttatatgattatcagtagacagtgtctgttttactatcgtatatgtagtacctctcgccgagtacttcctcgtcgcgtacctctgtagagtttacttcacagatgaattcgcttaggttgcagacatctatatcgctatccagcggcattaccagaaattcatggatactgcttggtatgagcagcatattgccgccgagcttttttgccagcgagcttagcacacccgggtagagtatggcggatgcaccgtttgtctgcctgctgtttgtaaggatatacataggcaggctgtcaaaatcacagactgcgcgcatctgattggcataacccggacattttttggcaagaaactctgccatgttgattattgagcatggaagtatctttggggtgttttgcattgaggcgcggattagtgtttctgtatctatgccccagcgtgacagaagggcatctgtgactgtaatggtgccaaattcaggcagttctgctcctacatatacttcaaatatgatggcaaaatccagatatttgatatagggcatgtcctttagctgcttttggtttttgtcgtagcttatgagctggaaaattattttctcttttaccttggaaaaatcatcacagaagcttatgtcaaaatcttcagttggcttgaaatcattgtaggtggataaaattgcatcgagaatagaatcaatggatacaccatcaagataccaatggtagtaaggattgagataaatagtcggtgctatattgaatttgggattgataatcaccaatccgtcgtagatcatcccgttgttctttttgacaggatggatggtaagcttgaaatcattgtcaagtcttgcggttatttctgtttctatagtatgtaaaaactccgtgtatttcatgaatctccttgcggagcataaaaatatcggatctcgtggaaaagtaaaacccacgaagcagggcgcttcgtgggttttactctatcattgtttattgaagtttgcaatatgtatttttgtacaatttttagacttcatttttgtgatatcatacaaaatatagctgtgtaatctatttttaatccgatttgagcctctgccacagtgtgttgtaaagagtggcatcattatcgttcaacgctctgtatacctcacagtttttgagcatgtcggaaggaggattgattgcctcgttttccttcgtttcctcatcctgattgtcgattacagcctggataggtgatgcatagtatacatattcaaagttgagctgtgcaggctcatcaccgcagatatagttcaaaaattcctgcgcaccctctttattcttgcatgtctttggaatgaaccatgagtcaatccagaggtttgagccctcttttggtacgatatagtccaggttgtcattttcagccatggcggcagctgcctcaccggagtagcacactgcgattgccgcattttcagcaaccatctcatcacaggtctcatccacgtagtaggcgagcacatcactgctttgtttgtttagtatatcaaatgcttcatcgagctttgctgtgtctgtctcgtttatcgagtagccaagtgtgcgaagggcgggagtaaaggcatcacggacagaattaatcataatcatgttgtccttgtatttgccgttccacaggcagtcccaggtatttaggtctgatgcatcagccatctttttattgtatagtatgccgagggtgccgtagaaataaggcacagtatactcatgtgtcgggtcaaaggatgcggacatgtcgattatatcctgatttacatttttatagtttggcattgagctgtagtctatcttgttgacctcaccctcacttatgagcttctcgatgatgtagtcagaggtgcagatgacatcgtaatcgatggcaccggacttgtactttgtgtacatctcctcaggctcctcgtattcctcgtatttaatggtgattccggtttcctgctcaaagctgtcgattactgattcatcgatgtatttaccgtagtttagcactgttatggcattgtcattgtttgtgcttttggcgcttatggtaaataccgaaaagcagccgattacgagtactgcaacaattgcgatgctcacactacgctttacgatgcgcagctttttagcccttgcaggcttctttgaggcgctgacaggtatccggtttgagttgatgtttaccacaaccaaaagcagcagcactgtgaagaaaagtatggttgacagagcatacagctccggctttacacccttttttagctctgtgtagagcatggttgagagtgtgtttactccggcaccctttgtaaagtaggtgatggagaagtcatcgagtgacattgtgaccgccatcataaagcctgagaacactccggggcttatttcaggccaggtgaccttgaaaaatgcatatagaggtgatgcgcccaggtcaagtgcggcctcataggtgtatttgttggtctgcttgagctttggaagcacattgagtatcacataagggatattgaacgtgatgtgtgcgataagcactgtcacaaagcccagattcatgaattttacaaacaaaagcatcattgagataccggtcacgatatctgcattgagcatcgggatgtttgtagcgcccagatagattgtctggttacgtttcttcatggcgcttatacccatggctgcgagagttcctattattgtagaaatcacagctgcaagcagcgtaatctgcagtgttgtagaaaatgccgacataatccgctcactctgaaagcactttatgtaccagtcgagcgtgaagcctccccatttaaccttggatttggagttgttgaaggagagtactattaatacaacgataggtagatacagaaacaaaaaaatcagtcccatatatacccttgatgctattttttttaccataatgcgctctggtctccttccttatcaaacagattgacgagtgccatgctgattaatacgaataccatgagcacgagtgagagaccgcttcctgcgccccactgcgagccatggacgaaatcctgttctatgatatttccgatgagcagaaccttgccgccaccgagtatctgtgagatggcaaaggatgtgagtgatggcacgaaaaccattacgattccgcttatgacaccggaaactgtaagtggcagtataatcttgaaaagtattgtgactttgtttgcaccgaggtcaagagccgcctcaatccagtcgtttttgattctggtcatggagttgtatataggcagcagcatgaatggcagaaagtcatagaccatgccaagcacgactgctccggaggtattcatgatgttgaagcccggcagtccgagagtggtgagtatcgagttgatgacaccgtttttggacaaaagctgcttccatgcgagtattcgaagcataaagttcatccacataggaagcatgaaaacaaataccacaaagctttggtttttaatctttaagccgtttaaaatcatcgcaagcggataggacagcaccaggcatattatggtgcatatgattccaagccgtagggataaaagcagtgccttgatattggtgtgctgtgctattgcagccacatattcaaatgtgaagcctccgtcagagctcttaaatgcatagtacacaatcatgaaaagcggaagtatgataaatccgataatccatatgaggtacggccctgcgagcagctgtttctttattttagacatctatctccaccgccttttcatctgaggactcaggcttgtgcattacctggatattaaatggaatcaccttgatacccacatgactgccgacctctacatatttggtggtgtgcaccatccagtcgtagccgttagcctttacctcaagctcatagtgcactcccttgaagatatttgatacgacatcgccctgcatgtagccgtcctccgcaggcaccagctccacatcctccgggcggatgactatatcgacaggcgtgttctcaccaaagccctcgtccacacaaggcatctttacaccgagtatctcgacaagcttatcctttatcataacaccgtcgatgatattactgtgcccgataaagtcagcgacaaaggcattttcaggctcattgtaaatgtcctctggtgtgccaatctgctggatatagccctgattcatgactacgatggtgtcagacattgtaagcgcttcctcctggtcgtgtgtgacgtagacgaaggtgataccgagctcatttttgaagcggataagctcatactgcatgctctggcgcagctttaagtcgagagcgccaagcggctcgtctaacagcagtaccttaggctcgtttacaatagctcttgcaatagcgatacgctgctgctggcctccgctaagagaatccacagagcggttttcaaagccgtcgagattgacgagctttaatgcatactttattttgtcatcaatgtaagccttgctttttttctttattttaagaccaaacgcgatgttttcagctattgtcatatgagggaaaagagagtatttctggaaaacagtgttcagatttctctcgtttgcaggcacatttgtgatgtcctttgaatcaaacatgatttttcccttgtccggtgtttcaaagccaccgagcatgcgaagtgtggtggtctttccgcagcctgatggcccaagcagcgtcagaaactcattctccctgatgtatagatttaaatcgtcgagtacaacattgccgttgtatgactttgtgatatcgataaaatcaattaatttctttcccatggtgtaaacctttctcatgtaattatagtactggtaggacctgtatgtttataatttgctgctgtacacactaaaaatgcggccggcagtaattacagacctataaaagagcttctgcaggggaagcgtcagaagcttggaggattgctgacccatatgagcatggcatcctttgaagacttattttcaataaaatgcttcttaccggctttaaaataaaaggactcaccggcctttacggtgtgcactttgccaccatagcaaagcttcactgtgccctttatcacatatccaaactcctcacactcctgaggcagatatatttcagaactgccacccggatgaagagtgagcctgacaggctccatggagcgggtctgtgcgtttggaatgatccattccaccttgctgttttttccctcgtcaattttctcgaaatagtcgtttgccttgtatacaatctgctcaggttccgaatctgtaaaaaactcagccggtgtcatacccaggcactggatgatatcaagcagggtgccgactgacggtgaattctgatttcgctcaagctgggagataaatcccttcgtcagctcagccctgtcagcaagctcctgctgggtaagtccgtactggatacgaagctccttcatacgatgtccgatatccatgtttacttccttttctaatacattttatgttatatttactgtaggtttaataatagattttttgtttactaaaaataaaccaacgagataattttaatatattttttataaatgtcaaggggaatttttgttgcttcttttatatggtacggttataataaatgtataaattatattttacgtatggggtgttatgaaaatggggtttaaagagaatattagatttgcatttattgatgaatttgccaatgaaataggaaaagaaaaagcatatcgaatgatgagtaattttaaatgtgaacgtgtgccggctttagaatattttttgacaagagattataatggacggataaagccttatatagtttgggatgatagtaaaaatattattgtcgcatattttacattgattactacatgtatgatacttaagccatatgaaaaaactgatcctgagcatactaaagaaaaagacgttgaaaaaatcatttcgtgtattgaattggaacattttgcattgaatgatgtgtacttgaagttggtaaaggaggatggatatagtaacagcggaataggaaattacgtatttaaagaatatatcagcactgtaattgcagttcttgtatcagaagttaattttttctatttaattcttcatgcatataataatgataaagtaattaatgcatatagaaatatggggtttgaaactatggaggatgatgcagaagcggtaattcctacattatctgatgtaagggcattacattctgattatgccggagattgtaagtttatgtttagagatgtagaatcaatattgactgatttggattaggaggaaaaactatgtacaataattcacaaagtcctattatggttatatcaggaaaaaaagcggagaaaatgttaagcaaatcagagaaacctattgcggatcatacaaagacaatagatagagcaaaagataaattgagaaaaatgggaaaaaaataaatctataaaaaacacctcattcagttttgaatgaggtgttttttatgtatgaagccgataaccgggatcgaaccggtggcctacgcattacgagtgcgtcgctctacctactgagccatatcggcaagcgatattatattatcagatataggagtgtatgtcaaatcaaaattttgatgtgaaattttaagggataataatttcagaaaggtattgacaatagaatgtatatagtgtatatataacacatgaacagttaatatatacagtacggaggtagcatatgaagctgatgcaaaattcaggagtgcccatctatcagcagatagcggacagcttcaagacagatattttggccggcaggtatgagcagggagagttccttccgtcgataagagggctggcaaaggacctgaaaatcagtgtgataaccacgatgaaggcttatgagcagcttgcagatgaggggcttatcacagcggcgcagggcaagggcttttatgtcaatgcacaggacagtgagatgataaaggaacagcatctgcgcaaggtggaggaatcgctgacagacgcgatagccgcggctgaggtagccggaatctcgaacgacgagcttaagggaatgcttgaggcgttgcttgaggtggataaataaagatatgaaacgagtcaggaggaatgaaaatgacaacaaagaatgcaattgaggcagcaaaaatcacaaaggaacttaaaaattttacactggatgtggagaatttcgcaataccgcagggctttgccacagctttaatcggagaaaacggagcaggaaagacaacacttttaaatatcctggcaggaatcaggcttgactataaaggtgaaatcacatactttggacagtattccgacaaacagagggaaaactcgggagatattaaaaaccgcataggctataccggccccggcaaatactatctgccgcagtggacagttaaagatatcgaggaaatcagcaagctgatgtttgatgatttttccgcagatgattttcacagatattgtgaggagcttgcaatattttcacatggcagcattgatatgaagaaagccaacagctcattttcggatggtatgaagatgaagctcatgctggcaggagtcatggcgcgaaagacagaccttcttttgctggatgagccggcatcgccgcttgatccgctgatgagagataagctatgtcagatgattggcgagtatatccatgagggcaacggtaagcgcagcgtatttttctctacgcacaatatctcagatatggaaaatatcaccgattatgccattataatggaaaacggacagattgtggagcagggctttgttgaggatttgaaggaaaaatatatcctgattaaaggagatgcagcagatacagaggctgccggtaaggtactttattcaatgaccaaaaatccgtacggctttgagggcatatgcttggcggaaaatatagataagctcgcaggacttaatgtgacaaaggagattccgacactttaccagataagcgttgcggtcatgaaaaataacacaaagattgtgatgcgctagtgagaggtaaggtgttatggaaagtaagtcaggaagtatgaatgaaaaaatggtttcacaggaacatgatactgaaagaacaattaataaaaaagataacaaagcaaagaatgaagttctaacatacatcagggattaccgtgttatgactaatctcaagtatcgtcttataacaaatatactgattccgtttttagcaatttttacatcaatgctaattgcctgttcgaaaacaatctgggcatggataggagttatagtaattgtttatgatttttatatgatgtgcgaggtggtgcaggactatttctgctttggctgtatgtgcaagaagaatgcatttggcatgcattttttaaagacaggttttaacggagtaagatactttgagaatgcagttcttgtggatatacttgtaagaccgctgcgtattggaattacaatactcattgcttcaataccatttattaaatttggagttaatatctggtcgatatttgacattattatgatatcttcaattgtttcggttggctcattaaatatattcagatacatggatctgggaatgtatatttatctgctggcgcttatagttatcttcccggcaattgcaggtagtatagctgttttgatttatggcgcaaaaatttggtttatcgcacctgtgttagcagtggtgcttgtaggagtgatagcagcgacatattatcatatgatggtgcgtatccgcagatcatatgttgatgtgtagaggcattttaaattggaagtatatttgaaaaggagaaatattatgctgaaagatattaaattaggatttaaattattgagatatggctacaaactgaagttgaatgtgatcatgcttgtattctttgcagtaatcggaattgcatccgatataatgagcaagggaacttccatcataggtggtgtatactttatgatgtgcgggatgtttacatttcagctcatcatgtcgatggatgtgtcagagcttatccagtccacatcactgaaaaagaagctgcagatatacattccggtgatgtcaagcacggtaatcaatcttgttgttttcacatttttggtaatagaaagagtcattctgatacagaattccgtagcagataagaaacagcttatcttcacactttttacgctcgatgttgagctgttgacagtatatctgtacacaagcatatgctataagtattatgtacttggctttatcgtattcatggttttgtttatgggcgtttttactgcgttttcaggagcagcgtttgtgccggtttctaatgctgtttttaagcttggactcccggtggtggcattgctaggctatattgctatttttgcaggtggagcgcttgagatattgataggagagctgctttacaagaagcctttgtcagaattcgcattcaggggatttttccgtgatgcaaagtagtgatgttactgttcccacataacagtgcgaccatcaacatagtgatttcaaaaaataagaaatatttgtgtaaaaatattgaaaaaatgatcgctttgtagtatgttatcattgtcggtgcaaagccggcaatgagactaattaacatattatcaggagaaaaatatattaaatggatagtgacagttatagtaaacaacagttagacgacttgtttatggatatgattgcctactatgatggcgatccaaagagaatccagcatttcaccaaggtgcacagctatgcaaggcttatcggtataggagaggagcttgatgatgcctcactctttatacttgaggcagcggcttacacacacgatatcggcatacgtgtggcggaggagaagtatggcaggtgcgatggaaagcttcaggagcaggagggaccgataatcgcccaaaagatgctctcacagcttggctttgagaactacatagttgaaagaatttgttttctcataggtcaccatcacacatatgacaatatagatggtcttgattatcagatactcgttgaggctgatttcctcgtaaatctgtatgaggatgatgcgggaaaccgtgcaatcgacaaggcatacaagcgcatattcaagactgaaacaggaaaaaagatttttagactaatgttcggatatgaagaagaggattagtatgagccgggccgggaggagacttccggcccttgttcgtattatgcagcttatatcagaaatagtaattaatcagaatagtaaatatgcagaatagttacctgaaataatattttgggatatgtcaaaaatttttgaattttgagaaagaaataatataatatggcaaataaaattaactatcaaaaattaatggaagatttaataaaagaaaactgtatggacaataactgcactccacggcttttgcttcatagctgctgtgggccgtgcagcacatactgcatacagacgctttcggagtattttaaggtgacggtattttattacaatccaaatatttacccaccaaaggagtatcacatgagagcacaggagcagaagcgctttatagatgagtttccggtgaaaaatccggttcactttgtggagggtgtgtacgacaccaagagcttttacgatatggcacgcggcatggaggctgtgcctgagggcggggagaggtgctttaagtgctacaggctgcgtcttgaggagagtgcacagtatgcaagggagcatggctttgatttttttactacgacactttccatcagcccgttgaagaatgccgaaaagctcaatgagataggaaaagacttagagagccaatatggagtgcgatatcttttctctgattttaagaagaaagagggctataaaaagtccacggagatatcaaagcagtatgatatgtacaggcagtactactgcggctgtgtattttccaaggagcagcgtgacagagagattgcagcacgtgggtgaaaatgtggttgcgtgacagcaaaaattattatataatttagcacagtaaagcggctgtttagagcaggcggcggtatcacatcttatttttatacaatacattgtgatacatgaaaataaatcatcatttaataatcaaggaggaatctcatggcacagttatggggaggacgtttcacaaaggagacagatcagctcgtttacaatttcaatgcgtccatttcatttgatcagaagttttataaagaggatatagagggcagcatcgcccatgttacgatgcttggaaagcagggcatcatctcacaggcagagagcaacgatatagtggcttgcctaaagcagatacttaaggaggtagagtcaggggagcttgaaatcagctcaaagtatgaggatatccacagcttcgttgaggctacacttatagacaggcttggtgacacaggaaagaagcttcacacaggccgaagcagaaacgaccaggtagctcttgacatgcgtcttttcaccagaaagacagtgaaggagactgatgatgagcttaaggaacttttagctgttatccttaagattatgaaggaaaacacacagactatcatgccgggctttacacatttgcagaaggcccagccaataactctggctcaccatatgggcgcatattttgagatgtttaagagagacagatcaagactgtgcgatatatataagagaatgaactattgtccgcttggctcaggagcactcgcaggcactacatatccgcttgatagggactatacagcacagcttctggatttttacggaccgacacttaacagtatggacggtgtgtcagacagggattatctgattgagtttttatcggctctttcaactatcatgatgcatctgtcacgtttttctgaggaaattatcatatggaattcaaacgagtaccagtttgttgagattgacgatgcgtacagcacaggaagctcaatcatgccacagaagaaaaatcctgatatagcagagcttgtcagaggaaagacaggccgtgtatacggtgcgctcatgtcgcttctcaccaccatgaagggtattccgcttgcgtacaacaaggatatgcaggaggataaggagctggcatttgatgcattcgacactgcaaagggatgtatcgcactttttacgggaatgattgatacaatgaagtttaacaaggacgtgatgagaaagagtgcaaacaatggctttacaaatgccacagatgcagctgattatctcgttaaaaagggtgtaccgtttagagatgcacacggtattgtaggaagaatagtgctttactgtatcgacaagggcattgcaatcgacgatatgagcatcgatgagctcaaggctatctctccggtatttgaggaggatgtatttgatgccatttcaatggagacctgtgtcagcacaaggtgtacagttggagcaccatcaaagacatcaatggacaaggtaattgccgtttacgacgagtatatgaagtcaaattggcaggatgaagtgtagtttttgtgcatattttataaaaaacagggagaaaaattattaatttaatatagttttttccttgtttttcattagagtttcaagtaatatatttcctataaagacagttgtacgcgacagacggacaaaacctgattttaatgtcaaagtatagtgtatgacatggtcgaagaaattctagaagatagggagattagagtaatgagtgaaaagcttaaagtaggtatcctcggtggaacaggaatggtaggacagagatttatttctcttttagagaatcatccatggtttgaggtaacaacaattgcagccagcccaagaagtgcaggcaagacatacgaggacgccgttggtgatagatggaaaatggacacaccaatgcctgaggcagttaagaaaatcatcgtaaagaatgtcaatgaggtagaagaggttgcttcacaggttgacttcgtattctcagccgttgatatgtcaaaggacgagatcaagaagatcgaggaggactacgcaaagacagagactcctgtagtttcaaacaatagtgcccacagatggacacctgatgtgccaatggttgtacctgaaatcaacccacagcacatggaggttatcaaatatcagaaggagcgtctcggtacaaagagaggcttcgtagcagtaaagccaaactgctcaatccagtcatatgctccggttcttacagcatggaaagagtttgagccatatgaggttgttgctacaacatatcaggcaatctcaggtgccggaaagacattcaaggactggcctgagatggttggaaacatcattccattcatcggtggagaggaagagaaatctgagaaagagccacttcgtctctggggatatgtggatgatgagaagaaacagatcgttcctgcagagtcaccggttatcacatgccagtgtatccgtgttcctgtattaaacggtcatacagcagctgtatttgtcaagttcaaaaagaaccctacaaaggagcagctcattgaggcactcgagaagttcagcggagtaccacaggagcttgggcttccaagcgcaccaaagcagttcatcagatactgtgaagaggataatcgtcctcaggttgcacttgatgtggattatgagcatggtatgggaatcaatgtcggacgtctcagagaggatacagtctatgactggaagttcgtcggactttcacacaacacagtacgtggtgcagccggtggagcagtgctttgtgcagagcttcttaaggcacagggttacatcacaaagaagtagatttagcaatttgctggaaaatattattatgagggcggattttccgtttgtgggttgtgggcaccggtgtagcacacagtagtattccttagataaaatatgaagtcagccacgggattttttacggataggttatggcagtttgcaagtctaaactgtcatttgacctattggaaacccgtggcagttcatattttttcttcggaacatactgtgtactctccggtgaaggcagtgtattgaacggaaaatcctcactctgtgattttaatttgcaaaagtcgagtcccttaaaagggactcttttttttagttttgttaggtttattattctcgggtggcttaattgttacgcttgaatttatattttatcgtggtaaaatagaaaggcttagaagaataatatttaagaggtagatataagtgaagaataataagtatgaaattgatatggtaaacggttcaataatggataagcttatttcgtttgcgttgccgcttatgatttcgggtattttacagttagcgtttaatgcggtggatattattgtcgtgggacagtttagtggcagcaaatcacttgcggctgttggctcgactacggcacttatcaatgtgtttgtcaatctgtttatgggtatatcgcttggtgcgaatgtgctcgctgcccgattttatgcggcaggcaaggataaggagatgtctaagacggtgcacaccgctattatgattgcactcataagtggtattgtgatgggtgtggtcggtgttatttttgcaaggggtgcgctggaaattatgggtacaccggatgatgtcataggtctttctactatttatatgaggatttatttttgcggtatgccgttttttatgctttataactatggcgcggcaattttgcgtgctgtcggcgatacaaagagacctcttatctttttgattatttcaggctgtatcaatgcactgctcaatctgttttttgtaatagtgtgtaaactggatgttgcaggtgttgcaatcggtacaattgtttcgcagtttgtttccagcgtacttgtattatattgtttgagcaaagcagataccagctataagctctgctttaataagcttgcaattgataaggaatatatgcttcagatatttcaggtgggaatcccggccggcatacagagcacagtcataaatatctcaaatgccatgcttcagtcatcagtcaattcctttggctcaatagccatggctggatatacggcggcaaataatatacttggctttttgtatgtatctgtcaactcaatcacacaggcctgcatgagctttacaagccagaactatgcggtaggaaaacaaaagcgaatggacagggtactgatagactgtctgtttctcacgacagcggtagcacttgtgatgggaagtgcttcatacatatttggaacacagatacttggcatatatacaagtaatagcgaggtaattaaatcaggacttgagattatttcaattacaacaatcccatatttcctgtgtggaatcatggacctttttccgggagcactaagaggaatgggatactcaaccgtacctatgatactttctataataggaacagtcggagtcagaatcatctggatatatggtctgtttccaagccacaggtcgctgtttttcctgtttatatcatatcccggttcatggatagcgacaatcatcatgcaggctatctgctatatgtttgtcagaaataaagtgaaagctacaataggagctcggaaattataattaaaatctatttgtatacgtgttaaattgtgatataatatttcaagttgattattttggagtaatattatgaaagcaaaacacacggatttagagaaacttgagcagctctataaagagtcgggtaaccagctcgtagtgctctacggaaggagaggctgtcaaaaggaggagctcatcgtggctcagagtgaggatagaaggagtatcatcggcttctgcaactgggacaagccaatgatgaccatggatgaattatagaggagcttatgggaaaatcactgataataacagagaagccgtccgtggcacaggaatttgcgaaggtgctgcgggtaagcggacgcaatgacggttatatagaaaatggagaatatgtgatttcatggtgcgtgggacatctggtcgggctggtctaccctgagtcctacgacatgaaatacaagaaatggcgtcttgaggatttgccgtttctgccaaaggaatacaaatatgatgtgatagacagcgtgcgcaagcagtacaatattgtgcacgctcttttgcagagagaggacattgacagagtttactgggcaggtgatgccggaaaagaaggacagaccatcgaggagaatatcagaaactttggtggtgtcagggaaggcatggaggagcttcgagtctggatagattcgcagaccgaggaagaaatcctaagaggcataaaagaggcaaagccgatgagtgcgtatgcaaacctcggaaagagcggcatcatgcgtaccatcgaggactatgcgatgggcatcaacttttcgcgtgtcatgtcggtcaaatacggcaatctgctaaacgatgcagcgggtacacgctcgtacacggcaatcgcggtcggacgagtgatgacctgtgtgcttggaatggtagtaatccgtgagcgcgaaatcagaaactttaaggagactccgttttacagggtaatcggcaggtttacggatgccggtgtagaggcagagtggaaggctgtagaaggctcaaggtactttgaatcaccgcttttatacaaggaaaacggcttcaaagaggaaaaagatgcacttgctttaattgaagaattaaacggcaaacaggcgaaagttaaatctatagttaagaatattgctaaaaaaagagcaccgcttcttttcaacctggcggagctgcaggcagagtgctcaaagaagtttaaaatcagccctgatgagacattacaggtggctcaggatctgtatgaaaaaaagctcaccacctatcctagaacagatgccagggtgctctcaagcgctgtggcaaaggagattggaaaaaatataagcaggcttaaaggttttgaaacgacagcagactttgtggagcatattatgcaaaagaggctatatgccaacatagctgatacgcagtacacggatgacagcaaggtaacagaccactacgctatcattccgacgggtcagcttacagagctttcggggcttacatcgcttcaaagagcagtatttgagctgattgtcaggcgtttccttagtattttttatccaccggcagagtatgagaatgtgaagcttgtcgtagatgtggataaggaaagtttttttgcatcatcaaaggtactaaagagcgagggctatttacaggtggcaaatccgccgaaaaagaagtcgtttgaggaatcaaacgcacgaatacttggtaaaaacagtgaaactgcagatagtacagatgaaaacagcacagcaaacggtagcaatgatgagatagtcgtaaatcccaaggtgatgcttgagcttgccgataagctaaaggcgggtgatgagatagcatgccaaggctataatatcaagtttggtaagacatctccgccaaagcgctatacatcaggctccatggtgcttgccatggaaaatgcaggacagcttatcgaggacgaggagcttcgtgagcagataaagggctcaggaataggcacctcagcaacgagagcggagataatccagaagcttgtccgtataggatatctgaatctgaacaaaaagacacagatactcacacccgaaagccttggcgagatggtgtttgaggtcgtatacatgacagttccggcacttcttaatccaaagatgacagccaactgggaaaagggactggacggaattacaaggggcacggtggatttctgggaatacaggggaaagcttgagagctttatccgcaaagagacagaaaagatgattgagcagaatctgcgccctgagattgcagaccgtatcagcagctttgcaggcaaaaatgccagaggtgcggcggccagacgaaagataggtgtcaagtgcccggtctgcggcggtgagatagtgaccacaccgtttggctacggctgtgccaattacaaaaatgataaatcaggatgtaattttaatatcggacaggtggcaggacttgatattccggaggaacaggtcaaaaaactgattgaagaaggaatcaccgacacaatccgtggttttaagtcgaagagcggcaaacgctttgatgcatgcttaaagctcaacaaggatgaacagacgaacaaggtatcagccacctttgattttgaaaatgtaaagccacaaaaggtcgagggcattgtatgcccggactgtggaggcgatatatatgtgtcgccatacggctaccgatgtgcaaactataacagacagacagaggatggctgccatttcttcgttggaaggatagcagacaagcagctgtcacaggtacagtttttagaactcatggcaaacggcagaactgagacgataaagggctttaaatcaaaatcgggaaagcgcttcaacgcatgcctcgttttaaagaaggagccggtcacagagggaagtgagaaaatgcacaccgtcgtagcatttgactttgacaatgtggaggacgaaatcataaaggatgtcgtctgtccgctttgtggtggtcagataaaaaagacatcgtttggctatggctgtgtgaactacaagggtgatgagccgggaagctgccgcttttcggtgggacagattgcgggaaagacaatcacagccgcaaacttaaagcagcttcttaatgataaaaagaccgagaccatacgaggctttaaatccaaaagcgggaaacgcttcgatgcgtgcctggtgcttaaggaggatgaaaacaaaaagctctctgtccagtttgattttgaccatgtagagccaaagacagtgaaggatgtagtatgtccgaagtgcggaggcaaaatccaagtggcgccgtttggctttgtatgtgagaacaacaggcgtgatgatcctgagagctgccgctttatggtgggcaaggtcgcaagcgtcaaaataaaggaatcagtccttaaggagcttttgacaaagaaaaagacagaagttatatcaggatttgtctcaaagacaggcatgaagtttgacgcaccgctaaagctcacagaagacggagatatagcctttgatttccccgaaaagcctaagccaatcgagacaaatgtactctgtccaaagtgtggcagacctctcaaaaagacacagtggaaatatgagtgtgagtgcggcttcaatgtttggcatactgtggcaaaggtggagctttcagaggaaattctcacggagctgtttaccacaggaaagaccaaaaagaaggtcacaggcttcacctccaaggcgggaaatgtattcgatacatgccttaagtttgaaaatgaccagatatcatttgatttcgataaccccggcgaggaagaagtgcagagcacggctgaagtacataacaatgctgatgcacagaacaatgctgatgcacagaacaatgctgatgcacagaacaatgctgatgcatataacaatgctgaagtacagagcacggcagatgatgcgccggataagacaaccatgaataatacaaccatggatgagatgggaatcccagaggaatttctggcaggatttgatatggcagctgatagtgcacaggcagatgatgtgtcggaggcggcatttgcggcggcgcatgagttgtttggcgagtagttctgctgataattaattattaaatctataattaatataaatttttatatttatgtttaatgcttatatttaagtttaaatattaaaatgacagttaaaaaaatagtcaataattttcacataataaataaaagaaaggacatagaaaatggaaaacgctaaaataacaaatctctataatctggatgaaacaatcgcaaaggagtatttatcacagttcacttatccatgggaggcacttgccggaataagtgatttcatcaaggagctcggaccaacactcgaccctgaaatctatgagaaaagaggagaggatatctgggtagcaaagagcgcaacagtatttgacagcgcatatctgcacggtccgctcatcatctgcgaggatgcagaaatcagacagtgtgcttttatccgtggcagtgcaatcgtaggaaagggctcagtagtaggaaattccacagagcttaaaaatgtaatcatcttcaactcagtacaggtgcctcattataactatgtaggagattcaatcctgggctacaaatcacatatgggcgcaggctctattacatcaaatgtaaagagtgacaagactcttgtagtcgtaaaggatgtttacgatacaaaagaggagattgaaaccggccgcaagaaattcggcgctatgctcggtgaccatgtggaggtgggctgcaactcagtgctcaatccgggaacagtaataggaagaaattcaaacatttatccgctttcaagagtacgcggagtcattcctgcaaaccacattttcaaggacaaggacaacgtagttcttaaaaaatagtaatgttgtttgaaaaaatattgtatttttgttgttttttgtcgatgatactctagacttatgacaaaaaatatgagaaaataaattgggtatgttaaaaccataacgaaaggagtcttaagatgatttacactaaggaagttgaaaacatgtgtcctgtagctaagggcgcaaaacatgagccagctcctatcccagaagaaggaaaatgggttcattctaagaaaattgaggacatttcaggatttacacacggtgtaggctggtgtgcaccacagcagggtgcctgcaagctctcactcaatgtaaagaatggagtaattgaagaggcattagttgagactatcggatgctcaggaatgacacactctgcagctatggcagcagaaatcttacagggtaagacaattcttgaggcattaaacacagacttagtttgtgatgccatcaatacagctatgagagagttattcttacagatcgtttacggtcgtacacagtctgcattctctgatgatggacttgctgttggagcaggacttgaggatttaggaaagggacttcgctcacaggttggtacaatgtacgcaacaaaggcaaagggagttcgttaccttgagatggctgagggctatgtaacaggaatcgctcttgacaagaacgatgaagtaattggataccagttcgtttctcttggaaaaatgacagattttatcaaaaagggtgatgacgctaacacagcttgggagaaagcttcaggatcatacggtcgtgtaactccagagcagggtgctgttaagatcatcgatccaagacaggaataagaggaaaggagaacgacaatggcattatttgaatcatatgaaagaagaatagaccagatcaatgctgtacttaacagctatggtatcagctcaatcgaagaagctgaaaagattacaaaggacgctggacttgatgtttacgatcaggtaaagaaaatccagccaatctgtttcgagaacgcttgctgggcatacacagttggtgcagcaatcgcaatcaaaaaaggatgtagaagagcagcagacgctgcagcagcaatcggagagggacttcaggcattctgtatccctggatcagttgctgatcaccgtaaggtaggtttaggacatggtaaccttggaaagatgctcctcgaggaggagacagagtgcttctgtttcttagcaggtcacgagtcattcgcagctgctgagggtgctatcggaatcgctgagaaggcaaacaaggttcgtcagaaaccactgcgtgttatccttaacggacttggaaaagacgctgcacagatcatctcacgtatcaacggattcacattcgtagagacacagtatgactacaaggcagctaagctcaacatcgtatctgagcatgcatactcagatggactccgtgcaacagttaagtgttacggtgcagatgatgttcaggaaggtgttgcaatcatgcatcacgagaacgttggtgtttctatcacaggaaactctacaaacccaactcgtttccagcatccagtagcaggtacatacaagaaagagtgtatcgagcagggcaagaagtacttctcagtagcatcaggcggtggtacaggacgtacacttcacccagacaacatggcagcaggaccagcttcatacggtatgacagatacaatgggacgtatgcattcagatgcacagttcgcaggatcttcatcagttccggctcacgttgagatgatgggacttatcggaatgggtaataacccaatggttggtgctacagtagcagttgccgtttctgttcaggaagcagccgaagcagggaaattctaaagaatccagtatttatgcgggttctgcgccgcggcaaaacctatgaaaacccatgaaaacgtacacatagtacacgggaaatacacaggtaataaacagcggtaatacacaaacaattaagcccccagaaattgatctgggggctttctgtatgcagctgatcgggcgtcaatcccattcagcgtcgattgattcaaattctatgtcttcgccatcatagctgatcgttgccacagcttcttcataatcgctgtacgccctgtgggtgtagacggcttctgttatgtctctgatcttatgtccgacaatagctttcagcaagttttcattcaccttgaaatgctttgcacatgaaataaatgtatgccgcggctcatgcggcgtgtgggagatcccaagatagcgcataacctttttgaagcgcccacggtattgatcgtatgtcataaagccgccagtctcattcgggaacaggtatttgctatctgggttatagtgatcctgtaccagctgacggatcaatggatgcaccgggacgctccggtcgatcccggcgtccgttttgatgccgcctttgattctccagcgcacaagatccacgttcacagtttcgatcagcaacacttccgaagggcgaaagcccgtgtacatggaaaatagaatcatgtccgtaacgccaaagctgcggatcttccacaggcgctgcacttcgctatttttgaacggtacacgcttagtcttgtcacgtttgcctgctttttgaacaaataacgcgctgtagtccttgtcaacaatttcatggatcatgcagtatttgtacatgagattgaaaagcgacttcatgcggcttttcgttgcatcaccgacaacagcgtcattgatcacgccctgcatgtgggagacgcgaagatcacgcatgcggacattgaagatcggttcgcagtatttgtacgccgcccggtagctgcgggcgctggaatcgttcttcaaggtggcgtagtattcctttgaccagaggtcgtacacttcggaaaacgtcagcttgtgtgcgttaatgtcatagggattctgcaagaaatcattcaaagccgtttcagcttcgatccgggttgcaaaggttccgatcagctggtattcctgcgtcagtttcccggatgcaggatcaagccgccagccgatcgtaattcgtgcagcccatggtttgcgacgtttcccagttagtttgaagacggagccgtcgccgtttgctcttttcattgccataaaaagcaccttctttctgtatattaccggaaaaaaggcgcaaaaaataaaagccccttttccgttgctttattgaagggcttttgctataataattttgcgagaattaaatagcaagcccgatcaatcggagattgcagccgcccaagtgttaccagcaccggggcggttttcttatgtagttacagaccaagcattttgccagctttccgttgacgcccggctttattagtcgggatcccggttgcctttgcaactttcacttttgcctgcgagataccaagcgcccggctgggactgaacgaaagtcctttgatcaatgattttttcttctccattattcttcaccttctatatctgtatattttattctcatttcagcaccataatattttttcttgccgccgccgtgtactttgaaatattccacgatataaggacgcccggcgtttttctccaagtaaggaataaaacctttcggaacgttgccgactatataatcattcacatatacataataggcgggttcatcattatataaatacctttcaagacgtgcggcatatccagaatcaaacggtggatcacaaaaggaaatttttttcaatatcgtttgtctggagcgaagccgcccactttcgttgttgaaagtgacaccagcaacatcaaaagtgatggtctttgttcgctgcggctgcgattgtggctgcacagcttcgggagaatctacagcagcaggatcactgggctggcgggctaatgagataagcacaacgcctatgatcaaacaagtgacaccatttagaattccatattgtataaaaccgacaacacttgaaactacgcaacagataccaaagaaataaagtaaaaattttttcaagtcgcatcttcctttctatgtatgaaaatcaatatgtataacttttccatttttctggtactttatgccattttttctgcgtccccttttacataccccagatcccggagttctacagcacgttctaacagcttttgacgtcctgcgtcattcagaatcttgtatgtattcagaaggtcgttttcgtcgtcggtaagtggggagttattagcagatattccacacatatcattcaaacctatatgaaacagtttgcaaattgcaaataacgtgtcaatgtctggagtgtatgcgccacgttcccagccagaaacagtagaaacgccagtttctaaataatcagcaagttgccgctgggttatcttcaatttttttctatagaatacaaggtttttctggatattctcttttattttcttctctgtttgtattgtcatttatgtgttaccgcctttctttaaatgtatattaccacagcaaaacaagactttcaataaaaaagtacagaaaaacagtaaaaaagtattgacaaaactgtattgcagtattatcatgcaaatatacagaaatgcagtacatgaaaggagaaaaacggaatggcaaacaaaaccatgggaaacacattgaaaacatacatgaagcgccacggaatcaagcagcagttcgtgtccgataaagcaggaatcagaccgcagattctgggggctatgctcaatgaaaaaagaaaaatagaagttacagaatactacgaaatctgcaaagccatgggagcgaacccggatgcaatagcagcagaagcgggaatctgggagcaggacaaggcagcacagctggtataaaccaacatcacacacaccgacgaaggagagaaagaaaacatgaagtatgggaaagagttgatccgggaacttgaagcagagatcgaaagatacgaaaatcaaatgtcacgccgctgggacaggataaacaacggcgaaacagatcaagaagattgtttcgtatcaatgagagtggaagaacgcggaagagatcttgcaaaggacaagatcaagctgattcagaatggcggctttgactggtttgtagaatacgcaacgcttgacggcgtgctggtgaatgcaaagtggtgtcagtgcagatccttcacaggatatggaaaaacaagcaaacttcgcgtagaaatgccggacggtacagtcaaatggacacaggcaaccactgaaaaaggactggcacgcataggaataaaacgcgtactgtgcaagcgcccggcgtggttcagatttagttcgggcggttccgggatgtacggcatatacacgggacaatataccactttcccgtccgacaagaactacgcaaccggggaagatgcaagcgaagaaccagtggaaatgaaagactacacaccgacgaagggagaatgaaaaaatgttgcagagtaaaggaagatacagccttgattgtataaatgatgtgacgtgcggcagtgtttggggaacaatcacaacgctggaaaatatcgacgaagcagtgcagcagcgcggagcattcagagcaaagatcgaattttacgggattctggaagaatacaacggcaaccgctacgcatttttcaaggatttaggaagagagacagaagacaactacttcgtagaacttacataaaaacaagcgctgtgctggacacacaacgcttgccatagaatgtcgcctgtattttagtggtgctgcataagcagcaaagtttcgtcgggatgtgtattttcgtcggttgtatacttcgtcggtttgtggatcaaaaaatagcagcgaactatttttgagaattcacgccggaaaagcgatcaagaatatcattgtatattctgacagcgatttccaacggatcggcggtattgtaggctttttcatattcacaggaaagataagggagcatagcaaccgtcaaggctgcggcgctcatttcttccgaaaatacaatattgtctattaccatacgcgatcacatcctttcgtagggcgacaatcacattatatcagaaacaaataaaaaaataaagaaaataaagagaaaaaaccacacaccgacgaaaggagacacgacatgacacagtacacggtcaaatatgacttaacagagaaagaagaagaagccctgcgggagttgctgccatgctatcagcagtatatagcaaaggacggcagcagaccttttgaaaaatacacgctggcagatgtttttcaatcgctgatgtacataggcagcaggcacacgatctggcgacatataaaggaagagcagttcagacagaatctgatcgacatagatcagctgatcgacgacaagtatttgaccatagcagagagaaacgcacacacagacgaagggagcgaagacacatgaaagaaagaacaatgacattcagcataaatggtgatttcatcacacggctggcgcgggagaaatgccactatgaagggaagatggaatatgcaatgacccttttggaaagctgtcttgaatccgacgagatcacagacaacgaaagaaaagggctggcttttgcgattctggatgggcgcgcagaggtaacggggacatatccgggcgacgattacagattccattatcttgatcagagggatgaacagtggaacattgcaagaacacttgaaaagctgcacgaaaaagcggagcaggcagaaaaggaactgcaccaagtagaagaaaagctgggatttatcgcaggcggttacatgtcaagctgggacaggagagaagcccagaagcagtacagggaagaaacgggcgaaaagctattcgccgacatggaagaagaaagagaaagcacagaaagcacccttcttgattctttcataaagcgcatgaagtcagaatctgacgacgattacggatggctggagccgaacggaacttttcacccagtagaattcgggatgcacgaaaaatgggcgacagatcacgtcgcggagttttacggagacgaacacaaagaaaagcggcaggaagcacgcaaatacatttcacgcggcgattttctggcagatcgcggctgggtgctgctacataacccgtcacagggaatcgcaatcccgacaacttcaccgggaaagagatacacaaaagcgcagaaggaatttttgtatcagtacttcatagacaggaattgcgaaaaagaagcgaatgagatctgggaagattaaacacaccgacgaaaggagcgaagacacatggcagcaggaaaaatcaaggtaacagaagcagcagcactgcttcacgtttcggatcagttcgtcagaatcgggatgcaacgcgggatcctgccgataggaacggcgctgaaaatgtcaacaaaatggacatatcagatcagcgaaaagctgctggcagagtacagcggcgctgatgtagcagcagaactggagcagatcagatccgggatataggggggcaaaaatggaaaagaaaatattttacacactcaagcaacaaaaaggcgtaaaaggtgtacggaaggaatgcgggtacgaactggaaattgcaacaagaaaattttatggatatgtgagcgcagaccagactgtatacataattgatccgagaaacgggatcgcaataatgagttgcgacactgctttgatttgcgacgacgagatactgcgagaagaaaaagaaattgaatgtataaagtatgtggcgaagcgtgcaatagaaaaaggcatcattgagagattaaaagaaaaagaaaagaaaaaatcgtacaagctgacaataaaagcattcaaaacgtttgtgaaggctgaaatacttctggaaaagcagaatgcggaagtgctgaaagaacttgcgaaagaggaaaacgcatgacaacaatagacgacatattgcagctgattgatccgtccgacaggctgcggatcgtaaaggacgggaaagaccttttcgtcggctatgtcggagtatacaagctggattcagaaaaacagctgcaagataccttcggaagctgcgaagtaaagagatttagagcagtgccggaactgcggcacaaggactggaagaaacgcgggcttgcatcaccgctgaaaccggaagaaacgccggactattacttcgcggatctgcaatcaacgctttattatacaatccacatctaagcacagaaaggaaggaaagcaaatggctgtatgggaaaaagaaggatggggaacaacgaacgactgcttgcagatggtcgttgataactacaggacacaagggacaaccgacagacattcagtgaatgcgcttgaaagctatctgcggagacttacgccgccagctttcaaagtcatgttcgagcatagcaggacaaccacagcacagatgatcgcggacgtgctgggagttgacaagctgctggacgtttacaacgtattcatgcaggaaccgggaaacacagaaaacgcacgcgaactgcggcagcggatcgaaaagctggagcagcaaaacagaaaccttgcaaatgatctgcaacaacagagagaaacaacgctggagcaggaagaagaatacagcaaagaaactgtgatctggcgggagacagaagaaagcctgcaagaacaggtcagaaccgccacggagcagctggaagaatcaaagctggagatcgtaagactgaaagcggagatctacgacattctttcaaagaatggcgatatttgaagaaaggggaaacaaagaaatgagcaaaaacaatgcagcaggaattgtcgggatcatcacgacgaagccgcgcgtagttatggacgcgccgacatgggcgcagaaagtgtatgaagcggtactggagtatagacgcccaagcggaacgaaagacaaatttttcgttcagtttccggggcaggcagcaggaacgaagaaagcacttttgaacatcaaaaaaggaaaagaagtgctgatcggcggcgaagtaagaacgcaaaacatggacaacccagagccgcacgaaccacgggtgaaaatctgtatctatgcaaaagtgatcgcagtaaacgatccaccagctgatccacagaacgaagtcaagctgtgcgggcatatctgcaaggatccacgggtagcaacggcacgcttcgggaaaatagcagtcacaagctttattgtggcggtaaacagccaccatggagcagattatatcccctgcgtatgctggcgaaatgtcgcagaagccgcagcaaagctgaaaatcggggcatatgtggaaatcaccgggcgtatgcagtccagagagtacaaaaagaagatgccggacggaaagccgccataccttgccacgacgcacgaagtatcagtcacgcagctaggattcgcagaagatacagacgaacaggaaacagaagggagcgaaaagacatgttaagaagaccaacagtaggaattgcgctggatgaaatgagcagacgccagacagaagaatttatgcgctttatcagcggaatgtccgtgaagaaggattctatcttcattcatgcggcacgcggacggatcaaagaacaggaagaagcaatgcagcagttcgcaaagctggcaaaggaagcgagacacgcagaagaccgggaaagcgtattcgcaaaaaccggactggcagcaggcttcgcaaatgggatcctgcgcgctggactgatcacaaaagacgaactggcgcagctggtagacatgctgaacaaagcaggaagcgacagactggcagaactggacgcaaagagaaagtctgtatttcaccgcattttcaaaggggctgtcttatgagcgccgcagaataccgcaagatcattgcagtagacttcgacggcacgctagcagtcacacagtttccgacgatcattgaaccgaagtggaatgaaattgcaatttgcaaggcactgaaaaagcaaggctgcattttgattctgtggacatgccgctgcggggaagatctgacagccgcggtcgaatggtgcaaggaacatgggcttgaatttgactatatcaacgagaacgtgccagagaatgtggaaaagtggggcaatgacagccgaaagatctttgcacatgagtacatagacgacaaagccacaaacccggtcaaggaacgtgcgtggatccggcggctacggaaagcaaaagcagaaaagctgatcccggctgtgattgcggttgtatcaatattcgctgcatacggagtggttgcagcattaaatcttttattttgagaaaggagacaagaaacatggcaaaaggagaaagcaagacgggaaactgccgcttttgtggtcagagttcaatcatagaaggtggcgcagacatgacagcgccgcagctggaagaagcggcaacaatgcaatgcacatgtgaaaaggctatggcataccaagagacggcgaacagaagaaccgtggcaaaacagagagcagaagaactgttcggaaaagacgctggagagtatgcacagccggatgatacgctggcatacattctggcaggaattgaccaagtatgtgacaaaaaagcaaagcagatcattattactatcaaaacgagcctgcgcgcaagaatcatgcagatggcaaaggataagatcaagatagttcgcgagacgtccaacacagacgagttcacacagtaaaccatacagccggaatctgacggcatatcacagcagacacgatccacaaccgacacaaaatgaagattggaaagaagaacgccgcccggaactgcaattccgagcggcgaaccgtacaaacaatataaaaataaaacgttaataaaagtatagcattgtacggcgaaaaagtcaagaaaatagcggcattacagccgcttttcacacttgataagtttattattccaacgacaaacagggggatcagtaatgccgtacaaacatgaaatatgcagagcaggaaaaacaaagcagcacacgttttattatgcagtcagaaccgacacaaaggaagggagcagaagacagaaggaaaacaagacctgtgaagcacagaagaaggtaaacagcagacaggcagtgaaaaagctgacatggatcctaaatgcgaactacgacggaacatcactgtacatcacatgggaatacacgaaggagaaccgcccagccacaaaagaagcactgcggacagacgttgacaagttgctgcggaacattcgccggatatacaagaaagctgggaaggaagcaaagatcgtctgggttccagaagtaggggaacgcggggcagtacatatccacatgacgctgaacgccatagacacacagctattgaaaaagtgctgggacaagggctggatcacaataaagcccatggacgacaacgggcaatacaggcggcttgcagaatacttcgtgaaatactctgaaaaaaccatgaaaacatgtgaagggttcacgggcagaagatacaacagcagcaagaatcttgtgatcccggagccacagaaaaagacagtttcttcaagaaacgcattcaaccacattgtcaaggttccttcgggttggtatctggacaaagacagcatacgggaagcatggcacgaagtaacaggctttatgtatttcacatatacgctgatctatgacggacgatacaggaagcaggatgaatcagaaagctatttgctgaatctggagactggggaagtagaaatcacagaaaagctgcaaaaggcagcaggaaggaaataaacatgggactgaatacaggatatttgaaagcagcaaggacggaagagggcaacgaacagtacacgccgttctatgcggtcgatccgatcacaaaatacataccgaaaacgaaaaaaatctggtgtccgttcgattgcgaatggtcagcatacttccagacattcaagcggggggggtggcaagtcgagcgtagcagcatagacgacgggcaggacttcttcacatatcagccggaagacttcgacgtgattgtgagcaacccgccatacacgcagaaagacagagtgatcgaaaggctgtacgaactggaaaagccgttcgcggtattgctgccgcttaatagcttgcagggcgttggtagatacaggtatttcaaaaacgggatccagattctgacattcgacaagcggatcgggttccacaacgcagagagcatggaagaatacaagaaaggcagcagctttgcaacggcgtacttctgccgggacatattaccgcgtgatctgattctggaagaattgagagaatacagaaaaccattgaaggaaggtgaaaagagcaatgacagaaccacagcagaaagattttgaagaactgctggagcagctgaaacaggaagaagaaacttgcgaaagctgcccggacagaaacgcaccagcggacaggtgcgaaggatgcggcacacatgggaacatacaagatcttgaacagctgatcgaaagcatgaaagaaggtgaaaaaggacaatgaaagcaaagtacaaagcaggaagaccagaagacaatctgacagtcgggaagaagtatgacgttgaagacgttagatgcaagaaagggtttgaagcgtcggaagtatacttgaagaacgacaaacagcagaaatgctggtacagcgtggaacttttcacaatgtacgcagaatcagcgctgccgctaaaaatgggagcagcagacgcagcactgggagcagccgcgctggcaacaccggaacagccggaagtagcaatcaaaactgcattcgtggacagcgagagcatacagcaggcgttatcgcggcaaattgcaaagaaaatgcgcgacacaggcttgatgtacggagcataaaagcaggaaggagcaaaaagaatgtacggaaatctgaaacgcggagaagacacggaacagatgggcgttattgactgggcgaactggaatttgcagaggttcccagaattgaaaatgctttatcatgtgccgaacggtggaaagagaaacccggcagaagcggcgcgattcaaggcaatgggagtgaaagcaggcgtcccagacctgtgtctgccagtacccatgaacgggtatgcggggctgtatatcgaaatgaagtacggcaacaataaaccgacggcagcgcagaaagaatggatcaagaacctaaaggaatacggctacaaagtgacggtatgctatggcggcacagaagcaacagcagaactggaagcgtacttgcagggcagcagaacaattctgatagatccgaaaaacgaaaactgcaagccacagaaacgcattgaaatatattgcagcagcgaagacacggaaaacataagatcagcactgtgcatggcagcagcaaaaggatcctgcgtattcggtagcgattttgtaccggagtgctgcatagacagtccgaacgcagagacacacgaagactgctgtgcatgtgtcctgcaaaatgtcgcctttgcggaatacgattgaaggtggcaggatgccgaaagcaataattgactggaattcaaaaagacggcgctttccgtacatgtgcgaagtctgcgggaagaaatacggcgacaagtagcaggcgaaaacatgtgaatgggctgacatgaacggaacgaacagaaaagcagcatatcaaaacaaaaaggcgaaggaaagaaggaaagaccatgaaaacaatagcggtgatcaacttaaaaggtggagtagcgaagacaacgacggcagcgaacatggcaacgctgctggggacgaagtaccagaaaaatgtattgctgatagacaatgatccacagggaaacgcaagccagttctttgactgctacagaaaagatgaaaaatgcggagcagcaaagatacttgacagagaaagaccggggatatttgctgacgtggcagcaggcgtggatctgatcaacgcaaatatgacgctgctagaagcagacaacgaactgcgaaccagcgaagacaggcaagacaaccgttttgcagagtacatggaaaaggcggcgtcaatatatgactactgcatcattgacaacccgccagcaattctgatgtgtacaatcaacgcgctgtgcgctgcagatgaagtaattatcccagtgcggcttgataactggtcaatcgacggcgtggacgtgataacggagcagatcgaagcactgaaagcactgaacagcaatttgaaaatagcaggaattttgctgacggactacaaaaagtcaatcgaaaatgaaacagcggaagaatggctgcggaagaactgcaaatacaacgtattcagccgcaggatcagacacagcgaaaaggcagtggcagcaacatattacaaacagccgcttgaaacatattcgccaagatccgcagcagcgacagattacagaaaattcatggaagagtacacaggcacaaagaaagcgtgaaaggcagggaaaggaaatggcaggctttgacatcacaaagatactgaacaaacagacaaccgcacagaccgaaaacgcagtcacagaagattttgaggaaatcaagctggactacggaaaaattgtgatcacagggaaaaacaagtacagcatgaacgacattgaagatctggcagcaggaatcgaaatggcgggcgggctgttggatccgttgatcttgggacgcgtcaacggagaatacaaacttgctggcggtcacagaagatacgcagcagtagatctgcttgtgaaggacgggaaagaagaataccgggaagtaccttgcaaatacaaggacatgacggaaacagaattcagactgtacatgctgatcgggaacacattcaacaggcactacaccgattatgacaagatggttgaagcggaagaatggaaagaggtcttgacgcaggcgaaggaagaaggatcttttctgccggaaaaaggcgtccgcgtccgggactacatagcaaagatcatgaagacgtcggcagcagtcgtgggagactggaacaggatcaacaacaacggaacagatgcactgaaagaacaatttgaagccggaacaatcggagtgacggcggcagcagcggcaagcagtctgtcagaagaggaacagaacgacattgcagagcgtgcggcagcaggcgaagacataaagggaaccgagatcaaggaaatgatcgaacggaagaaggctgcggcagcagcgccggaagaagacacagagccggaagaagcaaccggagagcaggaagaaaagacagaagaggaacacacaaaagccacactggcacagatgcagccgtcggcgtcggataccgacacaacagaagaagaaaaagagaatgcgcggcgcctgcatgcactgaaaatgcttgaaaaatactacatctacttgaacgaagacgatctgcgctgccttgaagcaatgctgcaagattgcaagcgacgcaaaatggaatacggggcgctggactgcggatctacaatttgacgaagggagacgaaacaaggtgaatggaattgaagtgacagtcaacatcaatctgaatggcgagaaggtggcaggaattacaaccggggagcaggcagcagaaacgctgccgccaggagacgtggggcgcgaggtaacacaggaagaagaacagcgcttcgccgtagcgtcagatcttgcgaacgtgtgcgaatatctggaagattcagaagtaattaaaatacgtctgatcgtgaacaaggcacaggcaaggaaggacagagcagagaaaggggacgaaaaatgacgcagcatacagcagcgattgtcattgcagcagttatggcagcaggcgtgatggtcacggcaacaacagcagccgtggcagcagtaaaagcattacgggactacatgaaagagagggacaagaagaatgagacatggattgatccaagaagtgacagaagccattgaaaacgaattatcagcagcaaataaggcgttccccggatttaacagtacgcatgaagggtatgcagtaattctggaagaagcacaggaaacggaagacgaaatgcggaaaacgggaatgaatctgaatgcactgtggcaggcaacgcggatgaatcagtcaccgaagcagatcagagagattgcggaagcaatacgggaaagcgcacaggcaatggcagcagaagcaatacagacagcagccatggcagaaaagctgatccagtacacggaaaggcaggaagaatgaacgcggcggcagtgatagcgattgcggcagcagcattcctgtatgtggaagcggcaatcgggacagggtactacatgtatttgattaccagaaagaagacgaagcaggacgcgacaaaggaagaacgaaagcagctgacaagatacagcataattgctggcgtagcattcccggtcacgtttgcaatattattcgctgcaagggcagcagaaaggaagtaacatgatcaactacactatggtaattatgacagccatcatctgtgcaacactggtgcttatggcatggatcggacggaagaagtaagagggaagaagaatgaacaaagttgacttgacaggaagactgacaaaggatccgcaatcgcgctggacgaacgggcaggaatcgcaggaacagatctgtattgtacgcttcacactggcagtgaacagacggaagaaggatgcaggtgcagacttcatatcatgcgtagcattcgggaagagcgcggaaagtctggaaaagtattgcaagaaaggaacaaagctggaaatttccggtcgaatacagacgggcagctataccaacaaagacggcggcaaagtatacacaacagacgtcattgtcgaggaatgggagtttgcagaaagcaaagcggcagcagggcagcagggaaaccagcaagcgccagcacagccggagacagacgcaaacggttttatgaacataccggaaggaatagacgaagaactaccgttttcgtaaaaggtgggagcaggcgcacaataaagcaacgctggagacgccacagagccgcacaggcggcaggaaaaagaaattgcaataaaacgtacagagtggtataataagccagtaaacaagacaaagacacacgcacagacaacgaaaaggtttgtgcagtgtgtcttttttgtttgcagctttccttcgatcggtgcaggcgtcgccgcttgcaccgtatcacgaaaggacattcgacatgacgataacagaagaccagctggaagcatggatcaaacagctgataaaagaaaataaattatataagttttacaagtggcatgagtggcgggaactgtccgcacaggtgatgaaagaaaacaattatgaatgtcagttctgtaaaaagaaaggcatccacaccagagcgcgcagcgtccatcatgtgcagtgggtaaggaaacacccgcgacttgctatgtcaaggacgtacacctacaacggcgtagtgtatcagaacttgatcccattgtgtgaagcatgccacaacgaacagcacccagacaaacgtatcaccagtgaaaagaaacatttcacaaacgaagaacgctggtgacgatccccccggtcaaaaagaatcagatttttgctgccggaagggaaacggggcaaggggtagacaaaacagattcgcgcgcacatgtaatgggggtggtatatatggcagatgaaagaaagccggaagttaaaaaaatcacgcgatcaaaaccgtacaaagagatcgaaaaagacctgcgggatcagctggaagcaaacggcacatacggcaaattttttgaagatatgatcgccgattacatggctatgtatgtcacgaaaacattattgatcgcagacatacaaaagcgcggaactatcgtggaatacaacaacggcggcggtcagtccggttataagaaaaatgaagcagtggacatgtttaataagacaaacgcgcaaatgctgaaactactttctgaactggggctgaaagcaaacgccacgataggtggtggagattttgatgacgaattatagagacgtcccagaacttcaaaagtacatagatctggtcgaaaatgagggcaaaaacggtgtaaaaaagtgctgcaaatggcaaaaaaaactaataaaattcgttaaaaagtgctttgaaaacgaaaatttgaccatagatacagaacagctgaaaaagtacatgggtttgcaaaaatacttcgattttgaactgttcgagtgggaacaatttgtattcacactgcattgctgcgtgttccgtgaagatgggctgccgcgtttcccggatctgttaatattcgtagcgaggggagcaggaaaaaacggctatctggcgtttgaagacttcgccatgatcagtccgtacagcaatttgcagcagtacgacgtcgatatatgcgccacagcagaagaacaggcgcggacgtcctttgacgacatttacaacgtgctggagaaacacagaaaaaagctgatcaagttttttcgctggacaaaatctgaaatacagtgcagaaagacaagatcgaaaataaaataccggacaaacaacgcaaagtcaaaagacggcttgcgatccgggaaggtagattttgacgaggtacacgcgtatgaaagttacgacaatatcaaagtgtttacaacagcgctgggtaaaaaaccacacccgcggcgaacctatatcacaacaaacggagacgtcaacgacggtgtactggatgatctgatcgagaaagcaaaaaagattctggacggagaaattgaagacaacggcttcttgccgtttatctgtatgctggacgatccagaagaagtacacgtcgaagaaaattggcacaagccgaacccgtccttgcagtatctaccgaacctacttgaagagacgcgaaaagaatataaagaatggctggaaaacagatcgtcttccagcgactttatgacaaagcgtatgaactggagacagggaaacggagaagtggaactgacaagctgggacaatattctggcaacaaagcaggaagtagaaccgccgaaagcgcgtgaaattgctgtggctggcattgactacacaaagatcaatgactttgcgtcagctggagtgcttacaaagcgcggtgaaaaggtagtctggaagcaaaaaacgtgggtgtgcctaaaaagcgcagatctgccgcggataaaatacccgctgaatgaagcagaagaagccggggaactggaattcgtagacgccccggagattgcgccggaactgatcgcggagtggataggcgagcagatgggcttttattcaatccctatgcttgcactggacgactacagattcgctttgatgaaacaggcgcttgcgcgttacggcttcacctatgaaaacaaaaatataaagctggtcagaccttcggacaaaataaaagtagagccgatcatagacagcggattcagaaatcacaacatagtatacggcgattcgtcgatcatgcggtggtatacgaacaacacaaagaaagtgaagtcaaaaaaatacgggaattacgaataccagaagatagaagcgaaaagcagaaaaacagacggctttttcgcattcgtagcagctatgacgcagcatgaattgatcccggaacagcagggatcagcggacgtgctgccactcttcacaatgtagaaagggggtgcaaggaagaatgaacatgaatgattattttctgcgggcattcgggagagaatcaacgatcaacgttacaacacagatcgaagaagaactgacagaagtgtttttcaaggaacttgcgacagcatgcgccatcaatatgatcgcaagtctgatcagcaaatgcgagttcagaacatttataaaagggatcccggagaaaaagggcgaatattacctgtggaactacgaaccgaaccagaaccagaacgccggggacttctggcagcagtttgtcacaaatctgttatatgataacgcagcgctgatcgtagaagtcggcgggaaattgtacgttgctgacagtttcacacggacacattacagcttccgcgaagacgttttcaacaacatcacgatcggagatctgaccatgcaaagatccatgttgtcacatgaggtcatatatctggaactggacaacataaacgccagacggcggctggaaggatcgtacacagcatacgggcagacggtggcaaaggcgatcagaagcgttctgcgtgctggagcgcaaaaaggaatactgaatattgatgcacagacagcggcacagccggacttcacgacaaagctgcaaacgctgatcacagacagattcaagcctttttatgatacggattcagcggtgctgccattacagacggggtacacatacacggacgtaacgaagcagacaacagcaccgacaccagcggatctgaacgagcgtataaactatgaatttgaaatggcgggcagggcatacaagatcccgaaagcacttatgctgggggatgtatcagacgtcgagaagatcacgaaaaactttttgacgttcgctattgatccgatatgccagcggatcggaagcgaagtgacgcgcaaaaaatatggggaaaagcagttcgcaaaaggaaactacatggacgtaaacacgaactgcatacagcacattgatattttcgagcaggcgacgaattcagacaagctgctatcgtccgggctgtactgtatcgacgaattgcgcgtgaaactgggtgacacagctttgaagactgactggtcacaaaagcattacataaccaagaactatgcagaagcagaaaaaatggaacacttaggagacgtgaaagggggtgaataaggtttgaagaatcagaaagcacattatagcttgcgacaggaagcaggaagcaatgtacataagctgtacatttatgatgatgtgacaaagtacggcgactttgactggtggacgtggaactacagcgaaagcgaaacaagcgcacagcatttcagaaaggttctggaagagataccggaaacggacgtcatagaagtacacatcaattcaaatggcggcgacgtaggcgaaggagtggcaatttacaaccttctgaaacagaagaaatgcaaagaacttgtagcatacgttgacgggttcgcatggtcggtcgcttctgtgattttgcaggcagcagatcgacgcgtcatggggctgggaaccagccttttgattcacaacatgtggacgacggtttccgggaatgcagatcagctgcggaaagcagcagacgatctggacacgctcatggaaggaaacagaaaaatttacatggagcgcgtgaacatcacagaagaagaactggaaagcatgatggatgctgaaacgtatctgacagcagaacaggcggtagaacagggcttcgcagacgaagtatcaagcaaagccggagaagaagccggaacggtcatgcagcagctacagacacagcttttacagctgcgaactgaaatgctgaaccagaaagcaatcaaaacacagatgcttgaattttgcaagcaggcaagcaagaaaaacgaggacagcgcagaggacgaagacgaagacgacgaagcaagcgacggatccgacgaggataacagcgaggacaacgacgacgaagacaacaacgacgataaaaagaatcagaaaaacaattctgatccgaaacagtctacaaataaaatggcggctttattagcaaaagcagccgcaaaaaatctggaaaagaggtaaaaggcatgaaaaacaaagacattgaacagctgtcacgcgagcagctggcacagaaattcaatgaagcattgaaaaccgaagacaccgaacaggtggcacaggcaatggcagaaatggcagcagggatcgaagaagagatcttgcagcgtgcaaaagacgtggcggcagttgagcagctggacgcacaggcaatggcagcacgcggacttcgccagctgaccagtgaggaaaagaagtattatgaagcagtgatcggcgctatgaagtccgagaacccgaaacaggcgcttgcatctatcgacgtgacaatgccgaagacgatcattgaagatgtatacgacagcttgaagctggaacacccgctgcttgcaaagatcgacttcaagaacacatcctacatcacagaatggatcatgaataaaaatggaaagcagaaagcgatctggggcgacattacagcggagatcacaaaggaactggaaggatccttcgagaagctggacatgttaatgtacagcttgaccgcatttcttccggttgcaaagtccatgctggatctgggcgcaacatggttagacagctacgtgcgcgaagtgctgaaagatgcgatctacgtcggtctggaagaaggtatcgtctgcggaacaggcgtgaaaatgcctatcggaatgaacagagacattgaagcagcacacggagacggtgaaagttatgtgaaaaagactgcgatcaaagtcacaaagtttacgccggaaacatacggcggtctggtcggtaaattagcagtgacaagaaacggtcgccccagaacggttgcatcactgatcatgctggtaagcccggaagattactggaaaaaagtaatgcccgcaactacggtgcagcgcccggacggaacattcgcaaataatgtccttccgtacccgacagaaatcattcagacagaagcactgacaaagggtgaagcaattctgggaattgcagaacagtattttgcaggaatcggaaccggaaaagaaggtactatcgaatacgacgacagcgtgcggtttttgaagcgtgaaagagtgtacgcagcgttcctgtacggcaatggtcgtccgaaggacaataacgcattcttgctgcttgacattaacgagttacagcctgcggcatacaccgtggtgacgggaaccgacaccgtggaagtagaaaagaccacatggacggaagaagaactgaacgcaatgactgtggagaagatcaagggactggcagcatacaagggctatgcaatcacaaagactgcgaaagcagaagtgatcgcggaattcttagcagcacagaccgcagctacggcgtaaggaataagcaaaggcagcagggcaaaaaaccttgctgcctgtaattgaaaggcggtgcagtatggcagatgaaacaacaaaaacgccagacgaacagctgcttgaagacattctgaatgaactggacatgacactggctgacgaaagcatgcagaaaaagataaaagacatcatgcagcgtggaaaagccaggatcgagaagataggtggcaaacagcttgattttgcagagaatcagcaggcgcgcgaattgcttttttcgtattgcagatatggacgcagcaacgccatagaacagtttgaacatgatttttcgtcacagctgacaggctttgcacttgacgaagcgctggcaacgctggaaagcggggcagaaaatgaaagcaaagtttgaggaattcaacgacggaaccgccagaatatgcactgtgaacaatgacggacttctggtggataaatacgaaaagccactgcgattcggagaagaaaacgtcagtatgaaacggcattatgcagcacaggcagcagacacacgggttgacaaagtgatccatgttcagcagcgaaaggatctgaaagcgcatgaagtcgctgtgatcggtgaagatcaattcgatatagaaaaaatcgatcagatcaacgataccatgccgccgatcacaaaattgtccttgatagagtatgaaaaacacagacgaaaggattttgcatgaacgtaggcgcgacaaagaaaataagaccagatcagctgaccggaacgcttgcagaaagtctgctggaatgggagcgggagaacgaagaaaggtttttccgggcgattgacgacgcagccgacgcatgcaacgaaacggcgggacaatatctgacaccggggcatggttacaaaacaggcgagtacaagcgacattttgcaatagaacggcagctgacagggcgccacagctacagtgcaacatggcacgtggaagcaccacactacaggctgacacatttactggaaaatggacacttgacacgcgacggaacaaagcgaacaaaagccgtaaagcatatcaaatacgggcgacagatcgcagaacaggtgcttgacgaaaaaatgaaaggactgtgggaatgacagacatcaaaacatatctggagacagaaacagaactgccagtagcagacacggcgtttgataaaccacagaagctgccttttgtggcgttcatagacaagacggcacaggacggcgacgacttccacgcccggatcgtcgaacacaatctgacagtagaattttacgcagaaagactggacaacgaaaacgaagggaagctggaaaaagcctttgaaaagatgaactggaaatttgagaaggaaagacagtggcttccagatgaaaaaatgtttgaaacaattttcactatgaattttatggaaaagaggtaaaaggcatgaaaggatcaaaggaaaaagttgtgctgggatccggcaaagtgtacacaatgttatacacaggaacattgccggagacattcacagagattctgaaaaaagtaatgacagaagaaaaccacaccggatggatcaagaacggcgcaagcgtggagtataagcccacaatgacgacagaaaaagacgatctggggatggtcgtaaaagagatcttgacggacgaagaagcaaccttcaagacaggtcttttcacatggaatgcaaattcactggcgaagctgtccgcaacggcagtcgtaaccacagaggatggagaaaacggcaagaagtacagacgcttgaaggtcggcggcacagccaacgacgacggcaagcagtatgtgatcttgtttgtacatgaagatccggtggaaggtaactgctatttgctgatcgtcggaagaaatacagcaggattcaccatcacttttgctgcggattcagcgacagtaattgacgcagaattcaactgcaagccgcacgacagccgcggaacgctgattgaatttgtcgaagagtacgaagaagagtaccagaacgaatacacaagcgaggaattgaacgcgctgaccgtagatcagatcaagaccattgcggcagcaaaaggttacacgatcacaaagacaacaaaaacagaaatcattacagagtttctggcagcacagacagcagcaaaaggctaacaatcaagaaaatgcggggcatgcgatacatagccccgcagaatcgaaaggaaggaaagcagaatggatttatcagtaaattttcagaaagtaaagcgtaactacatgacattgacctttgatgatcccaaaagcgaaaagggcgtcaaggtaattgtcgtcggaatgccgaaaaagaaggtttttgacgcacttatggacatgcaggacacgatcacagaaagagaagaagcgcagaacgcaaaggaaagaagcggagcaaacaggcgtacaatagaagaattgtacacactgactgcaaagattctttccaacaatctgaatggcgaagcgatcagcaaagactgggtagaagaaaacatggacattgaggacatgaaagcattcttcgcacagtatgtgcgtttcgtaaagatcccggacacagacccaaactaaacccgcccttctatccgacggatgaagaagacttctttgaaatcccgacgtactgggaacatttagtacatgagtacacaggactgaatatgaatgaaattgaagaactggagtatatcgactatttgcagtacaggcgggacgcttttatacattcgtgcaatcattcggaagaggggcgcgagtatctggagaacgcaagaacactgatgcagacagagccagacagaaagcggctgcgtgatcttttcggaaagccgaggtaaaatgggaaaggcactgaaagggatcacagtcgagataaacggaagcactgaaaaccttgtgaaagcgcttgaaaagccgaacgccgaagcagccagcctgcaaaaagaactaaaaggcgtcaattcgcttttgaagctggatcccaaaaacacggaactgctggaacaaaaacaagtgcttttgaaacaggcagtacagcaaacggaagaaaaaatgaaactgctgacagaagccgaaaagcagatggcagcagcaggaaaagatgtaaacgacgacgcatacagagacttgcagcgagagatcgcagccacagcgcagaaactggattcactaaaaagtcagatcagtacattcgataaaatgaagaccggggcgcagaacttcgggaaatcgcttgctaacatagcgcagaagatccccggagtgaataagctaacgacagcttttggaaatgcaaagcagaagatcaccgagacggtgaaggaaagcaagactgtaaaaacaatcggaactgcggttgacggggcaaggcagaaggtggaagccttcaaaaacgcacaccaggcagtacagaaagttgcggacgcattcgggaaagcaaaagcggcagcaggcgatctggcagggaaaatgccaagcgtaacacaggtagtgcaggcagcaggaagcgcagctactaccgcagcgaagggcggctggtcagtgctgacaacaacagtcggcggcacgatcaaggcttttacgacattttcagcagcagcggcaaccgccatggtggcaattacaaaaggagccgtggaaaactacggcgactatgaacagctggtaggcggtgtggaaacactattcggagcaggcgggcaaagcctatcagaatacgcaaagggcgtcggaaagacaacaacagaagcaaaagacgagtacaacaacttgatcaaggcacaagaagccgtgatcgaaaaagcaaacggggcatacaagacggcgggaatgtcagcgaacgactacatggaaaccgtgacgagcatgtccgcagcgttgatccagagccttgacggcgacaccgtagcagccgccgaaaaagcagacatggcaatcactgacatgtcagacaacgcaaataagatgggttcagacattgaatccatcaaaaacgcatattctggctttgcgaaagcaaattacacaatgcttgacaatttgaagctggggtatggcggcacaaaagaagaaatgcagcgtcttctggatgatgcaacgaaaatttccggcgtaaaatacgatatatcgcagtatggcgacatagtagacgcaatccacgtcgtacagacggaaatgggaatcaccggaacgacagcaaaagaagcagccacaaccattcaagggtcaatcgcttctgcgaaagcggcgtggacgaacctacagacaggacttgcggacgaaaacgcagatcttgacgcgttggtgggggaattggttgattccgtggtaacggtaatcgataacatagcgccacgcgtcatggcagcagtaccgcggatcctgcaagcagtaccacggctgatcaccgggttatctggagcagcgaaggaacttgcaggcgaagcaaaagggctgggacaatcactgatcgaaccgttgacgaacagcttttttacattgatccagacggcaatagaaatgcttccacagctactgccggaagtattaaacgcagcagtaatgctattcacaggcatactgcaaggactaaaccagacaataccacagcttgcggcaattcttccgcagctgatcacgacgataacatcaacaatcacacaaaatctaccatccattatcagtgaaggtgcaatgatccttgtaaatctgataaatggtatcacgcaagcaatcccaacacttatacaatccatagtcgatctgatccctgtaattgtacaggcgattgcagaaaatctgccgcagatcgtagaagcaggactgaatctgcttgtttctttgatcacaggcattgtgcaggcaatcccgcagctggtggacatgctgccgacgatcatcacgacaattattacagtgatcatacagtcactgccgcagatcttagatgctggcgtccagatactgacggcgcttgttaatggtctgatacaggcaatcccgcagctgatcgcaatgctgccgacgatcatcacaacgatcataaatgtgctgatccagaatctgccgcagattatatcagcaggaatacagctgatcggcgcactcattagcggactaatacaggcaatcccggtacttgtcgctgcaataccgcagatcgtgacggcaatatttacaaccttcaagaatgtaaactggggcgaactgggatcaaacatcatttccggcatcaaagacggtgtagtgaatgcagcgaaaaaccttgcaagtgcagtggcagacgcggcaaaaagcgcgctggatgcagcaaaagaagcgctggggatccacagcccgtcacgggcattccgggatcaagtcggaaagcagatggcggctggtcagttgatcggttatgaagaaggtatggaagacaacgcggacgcgttcgccaaggcttccagaaagagcgtgccgacaacgattgacggatatattgccgcaggcagcggaagcaaccgccagacagcgcagcaggggcagcagggcggcttcacgcagaatgtaaacatatacagcccgcgcgaactttcaccgtcagaaacagccagacagacgcgaaacgcgacacgacaaatggtattgaaattaaaacccacatagggggggcaaggcatgaaatcagtaaaatgcgtaaatgaaaacggactttcagccgtattcgcatacgatcacgattcaacagaatattttctggtcagccttgacggcgtatacagcatcaaaaacacggtaaacacaagccagaacgccaccacagacggatcaagctattctggggaagccttgcaacagcgaaacattgtgataactgcaaatattcgcagaaactaccgagaaaaccgcgactttttgtcgcgggttttcaaggtacattcgcaaggcgttttctaccacacagaggacggagaaacacggaaaatagaatactatgtggaatcgctggaaattgaggaaaaagggatcataagagcagccacaatatcgctgatctgcccggatccgtacttcaaagacaacacggcgacacacattgaaatggcaagctgggaaagcggctttgaatttgcggtagagataccggaagcgggcatggaatttggaagcagatcaaaagagacgatcaaggttgtggacaacgacggcacaacgtcaatcggtattcaaatgacaatcatagcagaagacacagtggtcaatccgtccattatgaatgtgacgacaggcgaaacactgaaactgctttgcacaatgcttccagatgatgaaatcgtgatcacgacggaacagggaaacattgacgtggtattgagaaggaacggcaaagaatacgactataactacacagtggacgaagacaacgaaggatatgtacagctggagacaggaagaaactacatcaactatacagcagacagcggcggcaattacatgaacgtaaattttgactttgaaaatcgctatgttatgccgtagggggtgtgattatggaacagacaaaggcaacagcacaggcaagcgcagcagtattgatgcgacaggaaaaacaggtaaaaatatacgatcaagccctacaaagaaagggagtaatcgacgtatacagatcgttgatctggacgcggaaatacaaagaagccggaacggtagaactgcacgcagcactgacagaaaaaaatctggaacttttacaaaaaggaaacatactaaccatgacaggatccgtcgaaagcgcttttgtagaaggaatggcggtggacgattacagcaacgagatcacggcgacggggcgcatgctttcttccgggttatcaaggcgaggtataaaaacagtgatcgcgttcacgtctggcacatacgaagacgccatgcggcttctggtggacaaggcagcaatcagcgtcacgtcaccacttccgctgctacagctgggagaaaagaaggggatcggcgaagctgtgaccttccaagtgtcatacaaagacttgtacacatatctgacaaaactttcagcgtgtagcaacttaggttttcgcgtccgggcagatttcaaaaacaaagtctattattttgaagtctacgaagggaaagaccacacggagagccagacaggaaacaagcgcgtgactttttcggaagtgtacaaaaatattaacaaagccacattcaccacaaacgatcagctatacaaaacacatgcgatcgtatgcggggacggcgaaggaacggcgcgaacggttgcggaagcgacaatcgacgaacaggcgacaggatggaacaggcgcgaactgatggtagacgcccgcgacatatcaagaacagacatgacgacacagcaatatacagcggcactgatccagagaggaacagaaaagctggcagaatgcgggatcgtggaatgcttagaagcagccacgctgccgtttgtgaatttctcatacaagaaagactatgatctgggcgatatagtcacggtcagaaagaaagcatggggaatcgaaatggacaaaaggatcacggaaatacaggagatctacgaaaacggcggcttttccattgtcccgacgttcggggatcctctgccggatagtgtagatctatcggacaactaaaaggaaggggcaagcatggcagaacaatatagtttttttaattcaaaagacaatgaccgcgtatacaatgcgcgacactgggctgattatttctacccgttattcaaaagcggtgtgtttaatggcgggcttgcagttgccgcaaatgacaatatgacagcgacgatcgcgccgggttacgcatggatcgacgggtacgcataccacttgacagagccgttgacagtggatctggagacggcaagcggaaacatgaacagaatagacaatatcgtcgtacagctggatctgtcaaacagatggatcaaagcactgacagtcaccggaaactattattcgggagcagccacagcgaaggaaccggagatcacagcgacaattcacgatctgattattgcccgcgtgaatgtagcagcaggaacgacagcgatcacacaggacatgatcgaagacaccagaatgaatgatgaattgtgcggctgggtatgtggagcagtgcagcagatcagcttcgcacagatcacagcacagtttgacgcgttttttgcagcatacaaagcgaatgtgacggcagaatacgcagcatatttgcagaatatcgcttcgctggagacacaggcgcagacgcgatatgacagcatggacgaagaattcacggcatacgaacagcagcaaaaggcggcgtttgaagcgtgggtggaatcaatcaaaaatattctggacggaaacgcagccggaaatctgcttttgctgatcaacgagaaaatgcagaaagtgaccgtcggggcagcaggcggcgtcgcatatctggagatcgaagacggcttgaacttagcacttgccgggttcactgcatgcgacacgacattcaatacagacggaacaatcacacagacagacaagatcgggaatgtaaagaccacgacttttgtttcaaaacagaagataaacgaagaatatgtgctggcgtccggcgacagatacacaaaaacaacgacattcggatcaaacggcataacagaaaggattgtgaaaaatgagtgattttgtagcagcaaagtatattctggataacatgaaaaatggaattgcgccggacaatgtagaagcgatcaacgtcatggcaatggacggcggggcaaagatcagagtaagaccgccaaaagacacagtgattgacaatcagctgatctgcaccgtaaaaggctacagacttttgatcaaagagggagcagcaccggaaacagaggacgacggaacgctgatcgaagaagtgacgcagcttgacaagtacaaagcaaacgcgctgctgcattctgggcttgtgaatggcacgacttactatgtggcagcatttccgttcaatgattacgggttattcaatcggaacgccgcaaacgtagcaaaggttgtgccgcaggcatacacgctttttggatattatgacgatctgacagacagcaacccggaaacaaagatccactacattgaaatgaatgcaggctttgaacccatgcgcgttgtggctgacaatacgggcggctggacagaaggaacatggagcgaagaaaactgctggatcctgcgcgggaaccgtccgtacatggtgaaaaatgacggcacgattgactatgaattgtgtcacacagactattcaaagaaaatcgacggcgtgacagcttccgacgtatcaaatgcggcttatgcaggaaacgccatggctaccataccgctgatctgggtaaagagatacacagaagacaacaaacagtaccatttattctgcgacacgcagctggacgacgacttcacagccggagcgttcacacgcgcagacggatcaatcgaaccatacacgttctaccctatgtttgcgggcagcttaatttcaaacaagctgcggtcgatcgctggtcaaggtcagatgaacagccagacgggtacaaatgaaatcacatacgcaaagaacaacggcgcattgtggaataccgggtatttttcgatcgtgcagctgcgctgggaacttgaaacattgttcactagatccacaaacaagcaggatgcgtgcggatatggtaattatacgggcggcacacaggcaagcaatttatcaagaacaggaacactgctgactggtggcagattttacggttacggatcaaaagtaaacaagccgcgaaagtttatgcactgcgagcagcaggcgggagcatgggaaagaataaacgggctgctttatgtgggcggtaagtattacgtgaaagaatcggaaccgtacaacgagactggagacggatatataaacaccgggctttcaatgtccggcacgtccggcggttacatcaaaacacaggtaatgacgaagcaaggttgttttcctacggagttagggggcagcagtgacacatattattgctgcggtggctggtacaacgccggacaggtagatcacgcggttgtggacggccgctgcgccgattccttgctttgcggcggcgctgtgtatgtcggcgatcttgtgtcgtctgcgtactggggcgtttccgcgcgcccttactgtaaaacacctacaactgcgacggcttctgatatagaagcctagcagttaaaaacgggggatcgggggcggtcagcccccgtgtaccctacattatacgaaagatacacgggttatgtgtgcgtctgtgcggttttccgtcgcctgccgcgattgtggacggcagctgcaacaattccttgctttgcggcggcgctgtgaatgtcaacaatcttgtgtcgaatgcgaactggaacatttccgcgcgctcatttctgtaaaaaatggatcaataacataatgcacacattattcggaagccaacggcttgaaatgataccccgaagtaggcggggcaagtaccagagtggaaagccctagagggaatagaaaggaagatccatgaaaacctacaaaaatctatacgaaaagattatttcagaagaaaatctgaaaaaggcattctatgcagcagcaaaaggaaagaaaaacagacgggacgtgcgccagattctgaataatatagacgaacatgtctgcatattgcatgaaatactgaaaaaagaagaattcagaccagcacaccacataccacaggagatcaatgacggattcaagcagaaaaagcgcaggatcataaagccgtactacaaatatgaacaggtggtacaccatgcaattatacagatcttagcaccgaagccagaagaacttgtaaaggatccgacattgaaaaaggttctgaaccgtggcgcgtatgaattttcgtgcggatccataaaaggacgcggcgcgcattatgggaagaagtatattgaacgctggatcagaaatgaccggaagaatacgaagtatgttttgaaaattgacgttcgccatttcttcgagagcataccgcacgacagattaaaagcaaagctgcgaagagtgattgcagatgaaaaaacactgcgcctgctggacattattattgacgccgtgccggaaggtttgccgctgggctattatacaagtcaatggctggcgaatttttatttgcaagacttagatcattacataaaacaggagatctggaaaccggaaaaggaaaagaagacagcgcaatatatcgccagaacaaagagaaaagggaaaacagccgggaaagtgccgaaatatgcttgcggcgtaaaatacggcgtccggtatgttgacgatatagtgtgcttcggagcaaacaaaagagatctgaaagtcgcgctggagaggatcgaagcattttgcgaagaaaagctgggtctaatcataaaagacacaaaacagatcttcccattatcgaaggaatatgaagtggagacaatcgacagacacgggaaaaagaaaatagtaacaagggagatcggacgcgcactggacttcatgggctttctgttcagaaggacacgaacgacgatcagaaaagcgattctgtacaggatcacacgaaaagcaaggaaaataagcaaaaagcagaagatcaactggctggacgccagcagcatgatcagccgcatgggctattttaagcatacaaattcgtacaacgtctttgcatgctggatcagtccatttataaatataaagcagctgaaaaagaaagtttccaaacatggaaagaaaggaagtgcgaactatgcagcagcctaactggaaacccggtgaaactaccgaaacggcacgcccggaagaaattatcatgggaacaggtcgtatcaaagtacgccggaacatcacaagagaaacacgcacaaccgaaacaggaaagcagaaagtctgggtatatgaatatgcagacatgacgctggcacagtacgaagaatacgcagcggaagtggcacagcttgacacgccgctggcacgacagatgcaggacaacgcaacagcacagctggaagctgtagcggcgctgtacgaagaggtaataaagacagcagacaaccagcgggcgatcatggaagggatcgcggaaatttacgaacagggggaaaataaagtatgacaagcgtatatgtaaaattggtgattgttggatccagagagatcagcagcgttcctgcaaaacatattgtagaagttgcaaagcgtgtgattgagaagggcgcagaggacggagaaacatatatcacgatcgacgacgtaccggagaaatacaaagaagctgtaatcgaagcgttgaaagcggacggctacgacgaaaacggcgaaagcatgtagaggggggacaagaaaaatgactaattatgcacagggattcatggacaagtacaacgcgatcgcaggcgcagccgtagcgattctgacagctgtattcggtatttactggtatgtattcgcagcctttttgctgctgaatgtgattgactggcttactggctggtataaatcgtacaagaagaaggaagaaagcagcaaaacaggactgatcggcattgtaaagaagctgggctactgggcgatcattcttgtggctttcattatttccggcgtgttcgtacacttaggaaacgacgtgctgggaatcaatctggcattcttgacaatgatcggctggtgggtggttgcaatgctgatcgtgaatgaagcacgaagcattctggagaaccttgtagaatgcggttacaatgtaccgcctgttcttgtaaaaggactggcagtgacagaaaagatcatgaatgcaaaacaggaaggagaattcggaaatgacagtacagagaaccagaagagggattgacgtttcagacaatcagaaagtgatcgactgggggaaggtgaaggcggcgggcgtcgccttcgctgtactgcgttcagtcagaggatccgggaaaacagactatcagtttcacaacaatctggctggagttagggcgcaggggatcccgtttgatgtctacaagtacagttatggaactacgccggaaaaacagaagacggaagcacagcaggtcgtcgatctgctgaaatcatgcggcgtcgaggactgtacagtctggtgggacatggaagacaagacgctgcgcctgctgggaaaagagaagttgacagcacttataaaagttgctaaagtgatcatagaagccgccgggtatgaattcggtatttactgtaatgtggactggtacaaaaacgtactggatccgacagcgttttcctgtagattctgggtggcgcgctatccgtcaaaaaaggaaatgcagctggaagacacgccgaacgataaatacaagccgcagatcacacaggaacttttcggatggcagtattcttcgacgggacgcgtggacggaatcagcacaagcgttgaccttgatctgatctacgaagatctggagcagaacgaagccccgaaggactacagtgcgccgtatgcagaaccgacatacaccctgtaccggggaagactggcacagaaagtggaatatgtaaaatggttacagtggcacttgatcaaagtgggcgttctgaaatcacacaccgcagaaggaaaaagcaatcttgatggatccttcggtaagagaacagaagcagcactggtggcattccagacagcacacaaggaaacgtacagcaccaaggagccggacaagaaatgcggaaagaagacgcgcgcggctctgatcgcggctgtgaaagccctttgaaaaccgggcaacaccggaacataaacaacgcgcaatacacaaaaggcgcgaaaaacccggaaaaacagcatgcgacagcttccgttgagcaggctgctgatgagggcaaattctaaatagaaagcttgattttataggctttttggagactcatatcatttttggtatgagtctctttttttagctcattttctggatttggtgtaaaaaatagctgcacgctgccctcaagtcgccatatgtaattattggcgacttggaaagtgaaatattggcgacttgggcgacgcaggttgacaaaaataattgtttatggcgacttggaatactaattccggttatattttatgcctcgcaggtcatagccttttgtatttttatttattaaaatttctaatatctcttgtgcgaaaggagaagtaaatgagcgaagtaattgtgagagaaaggtatttgaaaaatggtaagaaagtgtatgagtattgttttgaattggcacatgaagggggcaaaagaagaaggagaacaaaatccggatttgccacaaaacgtgaagcaagagctgcaggacggcaggcattgtatgaatatgagaatgttggtgaggtagttgttgacaataatatttcttactcagattttcttgatttctggatagaaaatgattgtaagaatacgtgtaaagaacagacgattaaaggatacgagaaaaaaattaaattatatattaaaccagagttgggagcatacagaataaaatctataaataaggataatcttcaggcatttattacagatttatacaatgatggattttcagtgaatacagttacttcaattaagggtttgctcaccaagtcatttaattttgcggtagacagaaattatatacctgcgtcaccggcagttaaccttgttatcccaaagaataaacagccggatagacctactagatttaagcagcatattttccttgaaaaagatcaggtagataagatatttgagagatttccaaagggtacgagcagttttattcctttaaagatagcttatcatacaggaatgagaccgggtgaggtatttgggctgatatgggatgatattgattttgtgaataagactataacagttaatagacaggtacagtggtatgctggtaagagaactgaagaagaaaaaaagaggactaatggaacatcggagtcaaatggatattggtatttctgtgagccaaagtataaatcatatagaacgattgatatagacgatacactactcgatattttaaaagaagaatatgaaaagcaacagagggcatgtgaatattatgacgagtactattcacattattattcagattttaaggtgacggatgaaatattaagaagaaacacagtttttccgcaaaacagaataggtgagacctgtacagagcatgaagtaaattttgtatgcaggcgtgaagatggttcatatgtaagttcgcgtactatgcagcatgtttcaaggattgtgcacatgcagctggtaataacggattatgatacgtatagtttaaggcacacacatggaaccatgcttgttgaacagggcgcagatataatatatgttcagagaagattaggacataaaagtgctggagctaagcctgtgaggaatcctgagagggaaaagcctaaatgggaggataccatcacaaatcgaatgctgcactggtcgtatacaccggagcagaaagaggaagtgaagaaagctcttgctgcaggcgttcccaaagcaacgattcttacttacttctatccagaggttactgtggagaagatgagttcatatcggaagaagcagtaaatgttatcgcataggcacaggaaatgtggtatactgtgcctatgtaaaaaagaatgtgttttacaaatcgttaaggaaagaatcgaaggtggtgcaaacgaaaaagcagtattgagacttttcattaactgccctttcgtttgcccgtagagccgataaaataaggctttgcggacatttgagaagatataaaaagatagttaaaaagacatatataatttaatttaaacgttttattttcatatatttttatactactcatttctatccttttctacttttgtatctcaagattaagcataaaattaacactattccaaataatgtacacataatatcaacaatataattctcataaggcattaaaaataatattgcctcccctaagtacattaacgaaatcaccaatgtatatcctttttctttatttttatcagaaaagtaatttttaaattcaattaagaatatacaaaataaaataaatataatgtatttttcattaaaaagtttatgctcacctaaatattgaatcatcttatcctccaaaatgtgtagttctccatattcacacctacaaaaaaataaactagaagcagagcaggaaagcttctagtttatcccatcttccgcctatatgctaactattttctgcgaacggttcattttttcgacgaacggttattttacaagcagactttattggagacagatagtaatttagaattgtgtttattatttcatttcctacatcgtagtctgtatggtcatcgcatattgcaattcctatcatttacacttgcccctatatttctataacatctttagtataacttttggtgtttttaatttacaatatttgtttcttttcccaataaaaaacaactgtggcataaatccccattatgggttatactactgttacattacactaaaacagaagaaatgaggacaaacatggacattttatcaggcaatcctatcagtgaaagcctgatatgcttcacacgaaagcttcacagctcatacttgatgctgctgagattatcatggctgaggcagaggtatagaccacagcataaaagtggaataactacaacatacaactaaaggtggcaaattgccaacaacttgttgacgatttgccgtctcttattttcttaccactttataacactgtgatacgatattttgcgatactttacgaggtttcttccgggcaggtctttgtattttcttttttcggcaaagccgctatttcaaacctgcggctatttcgccaggtaatacccagtacttagtggcaagccgccactaaccgggcaatggttgcacccttgtagcccacatataaaccaataatcataaaaagtctcatactacatctttacttcaatcacttttatacatatcatgaatccttaaatatttcatgctgcatccccggaataactgatgcaaaacaattctaccttctctaaaactatttttcaacaagacaactactaatcagttcttccaacatatcgttgctggcatttgccgatctgacacttgcagctatcatctcttcttttgaaacatcggtaaaatcaatttcaaatctaccattgttcaagcataactgctcaatgtatattctctgagtccttccattaccttctctaaacggatggatcatattaatctcacccaggtaataggctagtctctcgctcatttcttccttatcggttatgtcagctaagaaattttcctttttcagcttacaatacaaatcatcaaactggctttcgataaactgcaccaaacagaaaacggttcctttggaaatatcaaccgttctcgtcttgcccgcccaagaatatacatcactgaataaatgcttatgtatagaacaaagatgcttaaaagagaaatctccagtaacgccttgacctacaagttctgcctgacgcaccgctgaataatctctttcagcctcatgcaatgtatctaaatctcttatatccagtttattctttaatacatttgttcccggataacagtacttggcatcctgttcatcctcatagaaataatcatactcttgatccttcaacctgcttcttggatactctgtatttcttatttaattctgaaattgcatctgtagcagaaactttcttggttaagacatttcttactctttgacgacattctgcatcaaatggcatgctttccattttgaagctggattcaatactgcttactcttctatcaactgtcatacgcgtatcctttcccctttccctttcgcagaaaggtatttgttcttctatagtataccacaaaacgctacatctatatatactacaaatttccgtattcacttttcttaccactttataccactgtgatacgatattttgcgatactttacaaggtttgcaagctaatcactaaataccttccagcccttataaatcaagcattttctccactttctgtcatctacttctcatcaacgacctggaaaatgaaaaacttaagataatacgactccggtacattagctgagttggcccacagtatcggatgatccggtccctgtgtgcggaactccacctggcgcagcctcttgtgagttgcctttgccgcttccttgaccgtttttgcaagcagctcctgcgtcatgaaatgagagcatgagcaggtagccagaaatccaccatccttaacaagcttaagtcctttcatgttaatctcgcggtagccctttatcgcatttttggtagcctcacgcgactttgtaaatgccggaggatccagaatgaccacatcatatttttcaccatctgcagcgagccgtggcagctcatccagcacatttgcaacgcgaaacttcactgtgtctgagagattatttctcttcgcattttctgtagcctgcttaaccgcatactctgatatatcaagtcctgtgacctcacttgcccccgcaattcctgcattgagagcaaatgtacccatgtgcgtgaagcagtcgagcactcttttccccttgcagatgcgctgcatagcaagcctgttatacttctggtctaagaagaagcctgttttctgtccattttctatatcgaccatatagtgaactgcgttttctactatctccacatttgtgtcaaactcggctcctataaagccttttaccttaggaagaccttcttttttgcgctcatttgcatcactgcgctcgtatactccacgaatatttattccgtccgccgccagcacttcctttaacagttcaacgattttcaccttaaactgctccattccaagtgcaagacactccaccacaagcacatctgcgtatttgtccactgtaatacccggcaggaaatcagcctcgccaaatatcacacgacaacagtttaaatcaggcctgccggttgtaccaatgcctgccacacaagcctcaccggcagtgtctgtttcacctgctgcagacacattgtcattacctcctgccatcacctgcttgcggtaatcccaggcattttgcactctcatcctgaggaaactgtcatcaatcagctggtctgcttttcttgtcatcattctgatacggatttttgaattctggtttatgaagccgcgccccatcggatatccgtcgaaatcgtgcaccacaacaatatctccgttcgtaaaggtgcctgtgattgtgtctatttcattgtcaaaaatccatgcgccgcctgcttttatagtgcgtccttcgccttttttcagtgttacaattgtatgattttccatattcgttcctcttctaaattacttcattattccttgctaaaatctgattatatagtttatctgaaattctatagcctttagaaataagtttatttgtcaacattccattttaattatatgaaatcccggcaatatttacaatacacaaatatttctgcaaaacattccgatatataaaagtctctaccagcatttaccaacttgtaaaatcctctctaaagtgataatatagagattatagggtttgttatttttttaacgtagcattttgctactatcattttaggtatctaaggaggattttatgagctttttagaagagtacaagcagaaacttgtctcagcagatgaggcagtaaagattgtcaaatcaggcgactgggttgactacggctggtgcacaggcacacctgatgccctcgacaaggcacttgccagaagaactgatgaacttaaggatgtcaatgtacgtggtggtattttgcttaagccacttgccattttcgagcgtgaggatgccggcgagcatttcacatggaactcatggcatatgggcggttatgagagaaagcttatcaagagaggctgttctttctactcaccaatccgttactcagagcttcctcgttattatagagattcaacaacacctgacgatgtcgctatgttccaggttgcaccgatggattcacacggatacttcaactttggtcctaacgcatctcacctcggtgctgtatgcgagacttcaaagaaaatcatcgttgaggtcaatgaaaacatgcctcgctgtcacggaggttcagaggccaatgtacatatttcacaggtttcttacattgttgagggtgacaaccctgcaatcggagagcttggtgctggtggtcctgcaacagatgtagacaagaaggttgcagagcttatcgttgaccagattccaaacggtgcctgtctccagctcggtatcggcggaatgccaaacgcagtaggctcgctcatcgctgagtcagacctcaaggatctcggtgtccacacagagatgtacgttgacgcattcgttgacatcgcaaaggccggaaaaatcacaggagcaaagaaaaacatcgaccgttatcgtcaggcttacggcttcggtgccggaaccaagaagatgtacgattacctcgatgagaatcctgagctcatgagtgccccggtaagctacacaaatgatatcaagaatattgccgcacttgacaatttcatctcaatcaataactgtgtagaccttgacctcttcggacagatcagctcagagagctcaggcacaaagcacatcagtggtgccggcggacagcttgatttcgttctcggtgcttatatgtcaaacggtggaaagagctttatctgctgctcttcaactttcaccgacaagcagggcgtagttcactcacgtatccgtcctactcttgtagagggttctgtcgttactgacacaagagccaacactcactatatcgttacagagtatggtatggtaaatgtaaagggtctttctacatggcagaaggcagaggcaatcatctcagttgctcatcctgatttccgtgatgagctcatcaaagaggctgagaagatgcacatttggagaagatctaacaaataattaactttgtatatgatttttacaataaaagcggtttcaggatgcaatgtcctgaaaccgcttttatgttcttaatccgtcccacaaactatattttcaaatagttaaagcacctcttttagcacttcctcaatctcgctctttgctgccttgacagagccctgcaccataaccggcttaccgccgcctctggcgcccagcttgttcctcagtgctgtggcaactgtattgcagtctgcattcttgcttccgataataaagctatagccctcctcatcatttcctgtaaaaaatgcactaaagccactatatttctccacaaggccattgacgcaatttcttgctgtattcgtatcaatgccgtcctcaaacaatactgcatcttccgtatcagcaggaagctctgctaccttataatccaaaagcgctgactttgcagtgccaagctctgacttaagtgactggtttactgccttaagctttgtgacgttatccacaatagcctcctgatttgtggtaaatatccccatgagctctgagataatgtcgcacttttgtctgaaagcctccagtgccctgaaaccacaaaggatgctgattctgacgcctcctttataattctgataattcataaccttaagcatgccaatctcgccggtgcgcttcacatgcggtgcacagcatgcacacacatcatatcccggcactgtcactattctgacctgtccttcaatctcgattttgcttctgtactccagctgcgcaagctcatcccttgacggatatgtcacctctatcggaatattttttgaaatggctacatttacctcatgctccacctctgctatatcctccggtgaaatcactccactgaaatccattgtcactacagaatcactcagatgaaagcccacattctcaaaaccaaatctgcggtggacaattcccgaaaaaatgtgctctccactgtgttgctgcatattataaaaacgatgctgccagtctattttgccatgtacgtggacgcctgctgcaagctctactttctccggctcaaattcatttccggtgatttgcttaccagctttcttttctgcctcgcagcaatcatttgcggaaatatccaccgtatgagtaatgactcccttcttaatctgcacatcaacgaccctgtagcctccaagtattcccatgtccgggctctgtccgccctcctccgggaaaaataaagtctgatttaatattatatcaaactgcttatcatctgccttgttcggctcgcaggatataatatctgcctcaaactccgtggcatatgcatccctgtcgtatagtttaattgtttctgtcatactcatactgcttgttcctctcgctctatattcttatgcatcattgctatgtcatattatagcgcattaataattcatatgaaacccctaaatctggtttcccacaatcctgtagtatgctctcgaagtaatcttgaaaacaatatagtatatgaccataaacaccaaaagcgtagcagtcatgcagattgcaattaacttaatatccgtaagattgaacatgacaagcagtctgcgaagcagaggaaatgctgctgcaagatgacacgctgcaaggataatcggcaggaaaaataccatgcgcacctgtgaagtaatggatttcttcacctcgtcattgctcatgcccaccttctccataatctcatagcgtgctttatcatcatagccctctgaaatctgcttatagaaaataatcatcacagtaaccataagaaacatcgttccaaggaatattccgataaagaacaggccaccatacaatacataaatctgttctctgtttgcatcacggctttcctcatagaagcctgacacatctgattttacactattttcctcaaaatgcttatccagagcctttgccacagcaagcttatcctcactgctgccatacagattataatcaatttcattgttgagcatagtcggcacactaccctctcccagcgagctgttcaggttaaatatctctgcaagtgttgccttactgtctaccactacatagtacacaccactatacatagaggacatataactgtctttacttacagcagttttttctgccgcagccactttaaattctttgcccaacagattaattatatcgccattaaacttttccgttccataaacagccaccgaaccggtatcaagctgtgggatttttttattcagcctctctttaaagccggtctccatctcatcaatttcatctcctgtgacaaaatacaacagggaaatatcgttatcgaaacttaacaccggcttaaactcagtcccctctctaaacactgtccagctaaaataagtgtagcttttgctgtctttaacattacaagcagagtcagctattattttatccgaatctgcagcagcttctttaagtgcatcatccagattcacatcagccggcacttccttataccagctatatacactgatatccgaaggatatctctgcttaagttctccctccatgcccgcatacatgctcacggtcgtggaaacaacaaccagcaccattgtggaaagtacgcatatactcgctagtccgcccgcattctgcttcattctgtaaatcattcctgaaaccggcgcaaaatgctttttattatagtaaaacttcttgtttttcctgagtgccttaagtatcacaatgcttcctgaaataaataaaagatacgttccgatgatgacaagcagcactgcgacaaagaacagtgaaagcacctgaagagggctctttgtggtaatcgcaatataatatccaccggcaagacagcctagtccgattatagtgataagccatttgctctttggctctttctcaccgacattgccaccgcgaagcagctctatcggattagcaagcttcacctgcatcaggttatagatgagagtaagaaaatacagcactccaaaaataagtattgtatttacgacagcgctagtagatacagtgaaattaatttgcgctttaatatttataattctataaagaaacataatcatcagcttagaaaataaaataccggctataattccggatactattgctgcgagtgctactgtaagtgtctcaattatcaaaactctcgcgatatgacgtttttccatgccaagaatattgtatattcctacctctttcttgcgccttttgatgataaagctgtttgtataaaacagaaatatatatgaaaaaatcgctattattccgcatcctagccccattatatccaccaatatctccgcacccggcaccttgccaagtccctttgagttgtttaaaaacatcatcacataaaacatggctatcatgaccattcccgatataatgtaaggcatatagagagtcttattattttttatatttgtaaatgccagcctgctatatattttattcatgcttctcaccacctgtcgtaatcagcataagtgcgtcctgaatcttcacatagagctcgtcatttgtaagattgccacggtaaatctgatgaaatacctgaccgtcctttatgaaaagcaccctgttggcatgacttgcagcctttgtgctgtgtgtcaccatgagaatggtctgtccgtcctcgtttatcctgttgaacagcctaagcagactgtctgttgcctttgaatccagtgctcctgttggctcatcagccaaaattaattcgggatttgttattatcgcacgtgccactgctgccctttgcttctgtcctcctgacacctcgtatggatatttattaagcagcttttcaatcccaagcagcgaagctataggtgcaagccttttttccatatccctatagtccacacctgacagcacaagcggtaaaaagatattgtccttcagtgaaaaattgtcaagcagattaaaatcctgaaatacgaagcccagatgctcacgtctgaaggcagatatctccttttccttcaatgagacaaggttctttccatttaagagtacctctcccgctgtcggcttatcaagtgccgcgagaatatttaagagtgtcgtctttcctgagccggactctcccatgattgccacatactcaccttcctctacagagaaattgatgtttttcaatgcctgtacctgattgccgccaaatctggtggtatatatttttttgaggttacttacttctaagattgccatttcaatgctcctttacgatgatttcaaaatgttatttaaacttctatttttgttgcatttattttgaatatgacgtcataatcggcttcacaacttacattgttgctgcttcatgtaatgataataacaaaatgccagaatatatgctatcgaatcagcttacatttcgacctcgtatcttacatttttgtaagaaattaatttgtagttgacaaataacctcacatgtattattgtattaatcaaataatacagtagtacaaaagcaggtgaaatgatggaatggaattttaacaacgaaacgcccatatacctacagatcatagaccggttcaagatggatattgcaaacggcagcctaaagccaggtaacaaagtgccatccgtaagagagctggcattgtcagccggtgtaaatccaaacaccatgcaaaaggctctatctgagcttgagcgtgacgggtatctggagtcgagacgtacctcaggcagatttgtcgcagacatgggaaatcaagctgactcactaaaaaatgatctggcacataagctgtgcagtgagttttgtgaagggatgtcaaaggttggttttacacctgaacagtcccttacggtgtatgaaaattatcttaaaagtttaaaaaaggagtgatgtaaatggcagaacgtattgaaatcaaaagtctaagcaaaaactataagagccataaagttatcgaaaatatgaatgtgacttttcccggcggaaaaattatcggcatccttggccctaacggcagtggtaaaagcacactgataaagatgcttgccggagtattgcagccaaacacggggcagatactgatagacggtgagcctgtcggagtaaagagtaaggctatggtatcatatcttcctgagcggacatatcttaatccgtcaaaaaaggtgagtgatatcattgcatttttcaaggatttctatgctgatttctcacctgaacgtgcaaataccatgcttgagaaattcggagttgatccacaggcaaagatcaaaagcctctcaaaaggtatgcgtgaaaaagtacagattgtgcttgtaatgagcagggatgcaaagctttatctgctcgatgaacctatgggcggtgtcgatcctgccgcaagagactatattttacgcacaataatcgaaaactataatgaagattcaacaattcttatcacaactcatctaataagtgatatagaaaaagtgctcgatgatgtggtatttatcagagatggcggtattttcctaaacgattccgtagacaatatccgcactaattacaagaaaagtgttgacgagcttttcagggagatgttcgcatgctgttaaaattaattaaatatgatttcatggagcaattcagggagcatatcggactttatgcactggtgtttgtgtcagccctgacagaaataattttggatagctttgaatttgatcttgtatcagtatttttctgggcactgcatagcctatcagtaatcgccatgctgatctgcagcttagtgatcatagttctttacttcagacgcaatctgttaaaagacgaaggctacctcatgaatacgctgcctgtagcgccatggatgctgtatgtgtcaaaattcctgacagcttttgtactttttatactcgatctgatagttgctgttttaacattttctataatgaaccatggctttgcatggattaaagatattataggaagtatgtctgatgaatttgccaatgccggatttacaatgagtcctgttgtaatgtttggcagtattgcagtaatatccctgctctacacgatctctatattgtttttcagccttactaccggctacagggcaaatggaagcaaagatgctaactctgtgcttactttcatcatactttatgtgatcggtcaggtcgcaaatattatagtgatgatttttacattttttattccgctgtcatcaaagggatctatcacttatattttaacggtattaaacccacaggagattacagctcttataaacagagtggtcatcggtgcacttgccgtatcgctgatcctcactgtggtgtatgtcgcaggctcgatatacaatatgacaaagaaacttaatctggagtagtaaaaagaggattggcacagatgtgttgatcctcttttttctacagatttttaattacctcgactctcttttttctttgaatccattttatttattttttctttataaaatatatatgtctttttgactatcttttttatattttccctatccaaatcgtattttttaacttgacgaacgataggctgggaaataatacaacgactaattttgacttgtattcctgcactctctttatgaaaaaagcagaatgaactcacttatcaatttcattccgcttttctcatttcaattttctgtttatttctattttttaagcttctttcgcagcttctctttttgctttatctcttgctgtcagtctttctctgactgcttccatgtatcccggtttatccaggttatatattgccagcgggatgatacccataaagaatactaatcccggaagcaggttggctgccacattgataccagtctgaacatgaggtgtgatttctccgccaccaacatatccgaatgctcccataactacgaggaacagagagtttgcgattgctgttgcgatcttgaccgttgttccctggaaagagaatgccataccatcgttgcggtatccgtatttgtcatcgaagtcatcgattgcatcgatcatcataccggctccacatgggcctgctacataacccagaccatagtaaatcagtacaacaaaatcaaatacgatgttttcataaggtccgaagaacagaataatcaatgcagttccctgtatcaccatggaaatgattgctgttttcttctttccgaatttgtcgataatctttggtgtaaatggcataatcaatgtgccaacgatcatctgcatcatcataaatacagtaataaatgtaaagttctgtacacagtgcatatagaagtaaactgccactgagatacgtcccagcataccaaacatgttaaagaagcagtacatcattgcacaaacaagattcttatttttgaaaaccagtttcagaccttcactgacttttccctgatcttctttctttactgtgattctttcttttgacagatacgcaactgcccagaacatcggtaatgcaatcagcgcaagtacgattgctgttgaatgatatcctgcagcctgatctccttttccaaaccagagaaccagtttcaatacaaacaggtttaacacgatctgtccgattgtcatacccatcatctgtgctgcgttcagtttatttacttcttttgggtcacgagtcataactacaggcaatgccagatacggaacgtttgtcattgtataagacattcccaagccaatgtaagtaatgtaagcataagcaagttttgcaggtcctccaaatcccggtactgtaaatgtcagtatcgtgaagattacaaggaaaatcgcgcctacaaaaatgtaaggtctgaaacgtccccatcttgtgtgtgtacgctccatcaaagttcccatcatcggatcattgattccatcccatacttttgcgatcagcatcaaaagtgcaactgcaccaactccgagtccgaatacatctgtatagaaaatagacaggtatgtacttaccattgtccaagacagctgagatgcaaagttaccaagtccatatacaaaataatgttttcctgtcaatggcgtcatgccatatgcatttaatttttgttctttcatcttgttcccccaaatttctcatacatatttgcgattgtctcttcaaagttcacgtatttttccatcatcttcggcaatgtgtctttgtttgcgaccagctttggcacacatactttgatcatgttttgtatttcattgtaatgctcgtagattccgatatttgtatttctggcacgtgcgatttccttctctgaccattctacttttaccttttctccatctactttcaagtcaccccagataccacagattggacactctacatgtgttgttccgttcatgcttaagagcggattgtggcagacaggacatacgccctcttctcctacccatgtatctacttcgtcatatggttttccaagtgactctgcaactgcttttccgagttctgcacattttgacatcaatgccggatcaaataacggatgacctgttcttccctgatcataagcatctacgtgacctacacatttcatgcagaatgagaaactgaacagatctaacatcggcaatccgagagatacccagttgtgtgtctcagctccgccgacggaaatgaatcccgtgtaacggtctttgaaatatcttgggtcaagctccggctttccttctgcctttcgtttcttgttttcttcgatcaaagcagctctgtcatgagatggtccgaaacggtctacaaaattcttaaactgtcctacgataccaactgcgtaaacaggtgctccgatgatgattccgtctgcttccagacatgcttcttccagaatatggtaatcatctttcatacagcagtgaatctctgtctcgcccttgtcacgcatacggctgcagtaatcgcaggcacggcagtggccgatatccatgcggacggtattgataaactgtacttctgcacctgctgcctttgctgcaaacaatgcttcctttaccattacatcacttcgctggttccttcttccgaaggaaattcctaatactttcatgttttacctccatcgatttgttatgtacacagtttatcttttttttagatttcccgcttttctctgcaatgcctgtttggcagaaaataattgctgtatttttccttgccgtgcaaagaaaaacaaaaaatatgacatattttttgtcctgttttatttatttgatttcacatgggtttttcttgcaaaaaaaaaaggaattgtttccagaaaattctgtatcacaattcctttttcttttccttattttaaactatatcgatactggatatccagcaatctgatttcctgtgccatcaacacattttccaattccaacaccccgccctccacatggacatttttcatttccattctcgggattgcacttttttccagatactgcatctcatctcttgccagattcttgctgtactgcagtctcttccatatatcctgcgcacttccgttttctttgttcaccatgtgaatcttcacaaggtaatctccatccttcacattttccagacggaactgtagcttcagagattcatcgttttccatatagttatcaattgtttctactgtaatcttttcttcctcagaaaatacatactgagccgataatttcttaaagttgtgacaggcgattacgtacctgtctcttccattggttgtaataatggaattctcatctttcttgatgacattcggcaaaagccggttcataaatacatatgcataaaaagatggtttccggattccgtcacgggagatcattccggaatctccgttcagaacgttatccgcatcataataatcagaataactgtccaacgcatgccagtatgccatcaaatcgacttctccgttcatatcaatacagtttttgagaacatatgcgccctgattgcagctgtcattcaatacatttcggttggaaattgtgaagttccattcacttatatgtaactccggaacctgaaatccggtctcttttattacttctctcaatatctctgtctggtttctcatataatcgatgtcaattgattttcttccatatcgcttgtcattatcatcaattgccacatactgatatgaatataccgacagaaaatccggcattagattcttctttttccatatcggaagaatgctacggcatcccaatgttccatatccaagaataaaaccggctcctccgaccttgattgccggggagattccttttagaatccgataaattgttgcaaaatactgataatacaggccttcttcctcggtcatgccagtactttctgtagcacctgtattagagaagttataatattcaaaataccatgtttcaatctcatcaattccataacgattcaccagatgcgtacagaattcccggaaaatatattcatatacctgcacctcatagttttctatctcttcattctctttgaggaatttttctgccgaatagttcagcaatacttctttatgccccagttccagatacggtttcatatggttctctaaaaggaagtccagtatctgatcgattttacggaaattacatcctttttttccgttataacattcttctctggaaaagatattccacattcttgcatatttaatgtccgctgccttttgaaggtctctcagctggctctgtacattcgactgcagaacggtataagcatctccgacacagattgctttatgacagtctgtcaacaactttcctgtctgctgcacatccaccgtacatactttctgattctttacgaccggctcattgtgctgttccttgaaaatcagatactttttgatacgcccggattcttcctctgacaatccatgctccggattctccggctcctgctgttccctcattttccttcggtattcactcggcgcctctccgtagatatcccggaacgcttttgtaaatgcagcggaagtcgggaatccattatccaaagcaatgtgagtcatatttttctttgtgtacagcaattcatccaccgcatggaacaaccggacattattcagatattccatgaatgtcaatcccagatgttttttcacatattttgacaaataggcattcgacagatacaactgatctgacagattattcaaactgatctgactttgataatttgcctggatataattctggatccggcgtacgcgctgacgatcctgtgaatcatccatattcagccttgtatcatctgcttttacgaggaaattactcgtaaggatatgtgccgcctgaaaatataacgcctgcagatccaatgcgcttttttcatccttctcaaaatatctactcagaatatgatcaaagacttcccgaaggtctgcatatgccgcatttttgtccgcaacggaattacaccagaacaaaagctgcatggactccatatattctgccagcagatgaaagtcaatctcgaatcttgccccaagcaattcctcatttccattcattgtatggcgcttatttgcattaattagaatgatatccccttgtttcatcagaaaagtggtttcgtcaatttgcaccttcagctccccggtaagtacgtaaaatacttccggattctgatgataatgcgtggacacctccgcatttgtaataaaatgaaactgtattaatttcctatcgttttccatgatttcaacaccccaacacaactttattttccattttatctgctactaagtataccgaaatatcacacaaaaagaaagctcaaaagctgatgaatttttccacaccagcttttttgctctatcgacactttttattgaattctaaatctgcattgctgtaaaatatgcctgatttacagcatgatagatcaggccgacttgcttgcagtcccctatgatataagattcatccactgtttcacaaaactcgtctacttctgcatctggatcaaatgtgttcacatactccttgttcacttccgtgtttaaaattactttcacatcgtatctgagcatgatgaaatctatttaagttccactgtccagctaccgtctcccgatacttccgagacttttgtcttattttgctgtggctatctgctgttttttgcatagcaaggggcagccctctccgaagaagggactgcccccttgccttttatctctcatttcttgagatatttactctcaggcgattccacaatattcggacattccagattttctctccacattaccggtgcagcccatcgaactgcattttcaatcaccttcaacacataaggattgtggtaagacggatttgtctcatgtcccggctgaaaatagaagatttttccataaccgcgctgccatgtacaaccgcttcggaacacttcgccacctcgataccaactcaaaaatacgacatcgtccggctttggaatatcaaaaaattccccatacatttcttcttccttaagttcaaaactttcgggtattccctgtgcaatcggatgtgttggatttgtattccatactcggcaaaaatcgccctctcgccatttcaaactaccagaagttccaagcagggctttcatcggtttacttgggtgcgcagaatgaagcgggatgaatcccattcccttcaacacacggtcttttatcttttctaccaaacaatccggtatacggtcatgagccacatgagcccaccagattaacacatctgtatgatttaataaatcatctggaaggccatactccggcatgttcattctcacacttgttacttgcatatcttcacacgattccaaatgctctgccacagttcccatgacaccttttggatagacttcttttatctttgctgcaacatctgccacacgctttttcaatctagccttctcttctacagacatgtcttttgggaggaattcctcattaaattcgcctgcttcctgtacatattcataccatactgttaccctaatcattttacaattcctctttttgaatcattatccttttaacttcttagttctatcgcttcttaaatcttcctactttcgttaatcggttcggaagcttcggcactttgccggatgtttttataatcgcttctacttcacagacacccatacattttccacaaccatcacaatcgaattcgtcgatcatatgaatataaccggattttccttcgatgcagtctttcggacaaacatccatacattctccacagccgtcgcataacttcggatcaatgtagatggtttccgttgagaaacatacacctgcaggacagtttttcttcttgatatgtgcctcatactctcctgcaaatttttcgactgcagtgagtgcgattctggaagaattctgtcccatagaacatggtgtggaatatgtcattgcctcaccgatttcttttgtcatatcgataaattctgctttgccttttccatcttttacttctttttgcatatactgcagctgcaacagaccttcccgacagaacacacattttccgcagctctgttttctggatgcagtcaatctcttttctgtctcagttacgatacagtctttttcagacaggacgcggatcactccgttttctgcacttgccaccgtcagttcttctgcctcttctgctgtataatattcatacccaatctgtaatgcctttgcgctgttgagatcagttaattcagcaatttttgtattgcatgcaacttttttcagtgctgttccattgattgacacataacttcctgcttcataagaatctgcaggttctgaaaatgcctctgcaagatttgtaactgttacaatgtgcaccaatgcacatccttcatttgctcggacatccacaagatctgctgccagttttacaccgtatttctccgctgctgtcttcactgcttctgattcaatcagttctgccgcgtactccggtacatatagtatcttgttctctgtctcaattgcgtaggctgcaatagcaattccttccattacattttccggttctgattttaacagctcgaggagtacaccatcgatatcagcattgttcaatgcgcatacaataccactttcttttccttcttctttgctttctgcaactgctgcttccagacgctctgacaatttctgagcacagagtccgtattcctgaatatcaagatccgcaatcttctctaatacttgttcactgcttaatttttttgcattctctaaagcactcatcttactctgcctccttttgttctacaaaatcgccccacagacttggtctggagatctgtaatctcagatcacactgcagacaacgtccggcttctgcacagatatctgaatcacagataccgtgatcaaacaggttaaagttatcggaacgtttctccggtgcatccacctgcgtatgttttctttcctgatatccgaatcccggacactgtccgatatatgggtctgctttctgtaccggtgcaagtacttcggaaatatctccgtctccacccagatatttatcaatctggcttgctgcctgacgtccggattcgattgccatgatcactgattttgtgccataaattgcatctcctgcagcaaagattccttctacggaagttgtcttgtcattgtccatattcttaacaacaatgctgtttcctcttcccagttccaatccggcttcttctgtgatatcaggtctctgtccaactgcaaagattactgtatctgcatcgatatgatgctcggatccttcttctttctcaatgattgcgcgacggttttcatcaaatgtaaaggattttacattcatgaaatcgacacctgtcactgcatctgtacctgtaatccgctcaaatgtctgtgcaggatgtacaaagattccttcttcctgtgcctgtgtgatttcttcctcatccgctgtcattgcatctcttgcctccagacaagccagatggatttcttctgctccgagacgttttgctgttcttgcacagtcaaatgcaacgtttccgccaccaagaacgatgattctcttgccgatgccggtttcatttcccatacttgcatttctcaggaaatctgcatttaagatagttcccggaagctcacttccttccatcggaaggcgtactcctttatgtccaccgatcgtcataagcactgcatcatattcattcagcaattctgccggtttctctacctttgtattcacttcaatcttaacgccctgctctacgattacattcgcctcgtctgcaatgatttctcttggcagacgataagaaggaattccgtaagccatcataccgccgactgtcggaagtgcttctttcaaagtcacctcatgtccctgttttctcagataatacgctgctgtcagaccagccggtcctccacctacgacacagactttctttcctgtatctgccagctgttttccttttcccttccagtaagagcctgtatcatgatccgctgcataacgtttgatatcacggatggacattgcctcattgacttcttttctcttacattccagttcacacacatgggtacagatataaccaagagccttcgggaatggtactttctcacgaatgacagctactgcttcatcatactccccgtttttcacgtgacggatatagcgaggaatatctgtatgtgccggacaagcatgacggcaaggtacaattgcatcttctctcttcacttcggaattcatcagcttatcgcggattgttccggtcggacaaacttctgcacatgctccgcagaaacgacaatctgcatctttcaataacttgttatgtacggttccgacgtaagtctccatatctttcttctgatactgaagcacttttactccacgcagctcgttacatgcacgtacacatcttccgcagagaacacaacggttcatatcgtgaataatcagtggattatcctcctgtggacggaatccctttgtacgcattttcagacgtcctgtcttcggtccgatgtactgtatcaacatctgcaattcacagtttccgtacttcggacatgtagaacaatcttccggatgtccggtcagaagcagctccagagccagcattctcagacgctccagctccgctgtctttgttttgatcaccattccgtcttttgccttcaatgtacaggaagtcgttactccctcctgtccttccacttctaccacacacatacgacaggagcccagtgggcttaagtccttgtgatggcagagatgtgggatgtaaattccattttccaacgcacaatccagcacgttcttattctctggaacgtccagtttgattccgtctattgtaatgactgccatttctattttcctcctttaaaatatgatttaaaacaataatctcacacatccgtacattccggcatcattgcctaatgtagcaagtgaaatctctgtttcagcacatgcatgaaatgcctttgcagcataatgttctttgattccgtcaactaggattgctcctgcacgcgaaacacctccaccgattacgaagatctccggatctgcaactgccgcgatattcgccattgctgttcccagcatattacagagaacatctaccaactctgatgcaacagcatctcctgcttttgcctcgtcaaacacgtccttcgctgtcagttcttcatacgatgtaagtgtagtctccctcgtctcctcttccagcttctgttttgccatacgcacgattccggttgcagatgcatactgctccagacatccgtgtccgccacatccgcaggttgctgtctcgccatcacgcattttaatatgtccgatctcaccgcctgcaccgtgggaacctgctacaattttaccattgatgataattccaccaccgactccggttccaagtgtgatcattacgacattatcatgaccttttccgccgccctgccacatttctccaagcgcagccacattggcatcatttcctacttttacgaaaattcctgttttctcacttaattctttctctacatttaggacatcccagccaagatttacacatttaaatacagttccgtcaggtcctacaggtccaggaactccaagtccgattccctgtacttcttctttgctgatatttttttcatccagcttgccgagaactgcagcggcaacatcatctaaaattgctgctccgtgattctctgtatttgttttgatttcccacttttccaaaatagttccgttcatgtcaaacagaccgatcttgcaagtagttcctccgatatctactccaaagccatattgcttcattgatttttctccttcatttttcttcctgatattgttacaacaattccaaacatgagcattccgacaaatgcgattgtaaattgatttaccggatgattaccacccagcacatatgttgcaatatttcctaatacaatcggtgctaccaggccaccaatgccgccgatgattgaaaacattccgctcgcctttgccactgcttctttttctaccgaaacggaaatcaaataagaagtcatcgccataaagcagcttagcgacacaccgcacagtgcacttgctacatacactccagccattcccggaacaaacagaatcacgccgtatcctgctgccgcagccagaatcgaaaatgcaagggtgtactccttcagcactccggaaatcttgccgaagaacattccgaccaacaaagcaaacgcagagtttactgctgtcacaacccccgtcacagacggattatctgtgatattttgcaaaatataaattccaatattcgtgttatacgcattaataaataatgtatgtacaaatgatgcaagcgaaatcacatataccatcttgttcagcttcatatctgatgaagtctcgtccatgacaggcggtgtctcgatcaacacgattttgatgccggctgctgccaaaaacgcaatcaaataaacaagataaaaactgcggtatccgattcctgccaatattccgccgatcagattcccaatcattgttccaattcccattccgactacatgtaaccccatataggatgctctttcctctggcgggaaaaattctgtaatgattgctgtgttcatcggaccgacgataccgaatccaaatccaatcaacaatcgggtcattacaaggatcaaaaaattttctaaaaagaacggaagcataccacagattccgataacaatcaatccggtaatgacgattttcttcttactgattcttgttgtcagccatcccacgaggagagatcccacgatcaacatcaaatatggcatcgtctgcagctgctgtaccattcctgttccatattgctggtatttttcatttaaaattccaagaatcggaagaactccggtaatattcagtccaaaggcgaatgctgtaataaacacactgactgcaattctattttttgttttcatatctgtcctttctctcttttcacttagatttattcacacggctgcagcacatcccagtgttctgcaatcatcatctccctatctaataattttgtaataatcggcttttcgttctatcggctccggaaatccatttgcaggatagcctagaatacaagaacccactccgatatattctccttcatagcctgcttcttttaacaattcttttcctaattctgtctcaaatgtctccctgatccggttgatccatctagaaccaagacctaacgcatatgctgcgttaaacatgttacccaagcaaagacttccgtcttctaccggattaccgactcccttttctgccaatacaagaataatagtcggtgctccgtaaaacacatcaaatccttccggtgctccggcaatctcagcattcagcttacatagttttttaatccattcaggattctgtactgcaataaagatcggtgactgcttgtttccaccagacggtgcgttcattcccgcattcagtacggccatcagttcctcatctgtaatctgctccggtttatattccttcacacttctgcggttctgaatatcgattactgtatctttcatagttttcacctttcttcaaataagagcggagtttcctatccactccgctccattcgattctgtcattttttcattacaactcagtctttgctgatctgcactactacatttctgctaataaagattaatcttcatcctctacatattctgcagcgctcataccagcaatacgtcctgtattcactgcaaatcccatggagttacccggaagcaggaacatataactgtcatcgtaaatattacatgcatcagcacctgctgcataaagtccaggtaccggctcaaactctttatcgcatgcttcacaattctcattgatacggataccaccaactgttccatatccacccggacggatacgtgcgccatagaacggtgcttttgtaattggtcttaaatatctcttgtctttgaagaattcttcatctacactgtcacagaagtcattatactcttccactgtatctaccagattatctacatcgataccagccttctctgcaagttcttcaatgctgtctgcgatatacagaccttcatttccgttctcttttgccattttgattgcatctgcaaaatcagaaacatctggatttgggcgaaccattgatacgttatccacaccatttctcatgtaatattttgcgatagaagaatctacgatgctgatacatacacgacctttctgatgagaaacaacattagaaagatatgtagcgttctgcatatgatcctcgttcattacacgttttccctgcaggtttacaagcaggttcggctgtcccataatatttcctacacttccaggaagatcatctacaccttcaatcgctgctgcctgttcaattcttaccggaagcttgtcagctccagactcccatgccattctcagaccgtcgcccataataccaggaattgcaaagttgaacatatcctctccatgtttatatcctgtctcatccttgatcagtttcggattacatccggctccacctgtacagataattgctgctttacatgtgatttcgatttcatttccatctttatctgttgcaagaactcctgccacttttccatcttccattacgattttctttgcaggtgtctccagcaatactttcacgccaagttcctgggctctggaatacaaagctttgttcatgaatgatgcagctcttggtccgattccctgatctgtttttacgatatgccatgtcggttctgattttgggaagtagcggtatgcgccttcgaactcaactcccatgtcctccagccactcgattgtctctcctgactgctcgaaataacgttttacaagacgtgcatctacgttgtaatgtgtatattccataaacatgttaaatgctttttctactgtgatatcttccatctgctgtttctggtattttgtaccgattccaagcggtcccattcccatgtttgctgcaccgccgactgcagctgctttctcaagaacgataacctctgctccgtcctctgctgcctgaacagcagcggataatccagaaggacctgctgcaataacaacaatctgtgtttcataatttgccatgatctttacctcacttttcgaacttgttattttttaacttgtactcattttattatatttgccaagtttcatataccatgttttaaacctaaatcacttgtatttttgtcctgaaaaacctgttttttgaatggagaacaaaaaaaccatatatcatttttgctctttgagaataaacaaaaacaggcaagtcacaaccatcaatgtaacttgaaaacgcccgcagaatgactacaaaatctttgacttgaatctttgatttcataatccccatgcggacgtctcaaaagacagttaacaactcattttttactcttcaaatgcgattgcttttccggtcttagcagactctctgactgcatccattacacaaagaacacgtctcacctgctccggtttaataataatatcttcttctccgttaaatgctttcaggaaatgttcaaagtaatttctgtgatccacatttacttccggcaatggctcttcatacaacagtcccggctctggaggtccaaagcttcttgtaggacctgctgcagtcatcgtgatctttccagggacattttccaacagatgcgctgtgcggacaatcttgccttctcctgcgaatccatcaatcaatgcagaacctttatttccaccgatgaaccatgcacgctttggtgtcaggtaatatgttccaagctcaatctctgctgtcacaccgttttcaaacttcatgattatcttgaagtaatcatctacattttcattgatgacattctgaacatctgcatagagagatacgattttggatttcaccatatccaacatctgatcgatcagatgtacaccccagtcatagagcattcctccacccatctccgggtagatatgccagtcatgcatatttccgtttactccgtaaagctgggatttgatgatgtacatatctcctaccattgatttgtcgtaaacttctttcataatacggtagtctttgtcccatcttctctgctggtgaaccgtaaagatcacaccattctcctcacatgcagcaaccatctcatcatattccgcaacactcattgctgccggtttctcacagattacatgtttttttgctgctgcggcctttttaaccatctccggatgacttgggttcggagtcgataccattactacattgatatctgcatttgcaagcatttcatcaatatttgcataagtctccactccttccggagcatcttttaactgttccggattggtatctgcaactgctacaaggtcaatatcatcaaatgttgccatcatatcagcatcgcagtgtcccatgaaaccaaatccgacaatacctaatttcattttttccatattatccaccttctcttcaaagggggtcagccccctttgcccttcgttttcggaatattttaaatttaaccctcgattgctcttctcattgcttcctgatgacggcgtacctgctcaatactgtctacttccatatccgcacgcagatgctctccaccttcatactctgaacttaaataacctttatatcctgccttcttaaatgcctcaacaacttctggaattgcaactgctgtctctacatagtcttcacttacattgtagaattttgcatgtgtatggaaaatataatcgatgttatcgataatatcctgtggctctgaccaggaatatgtgaatgaagatcctgcatattccatatcagctgggccgccgcctgctgcctgtacagcatccatcatttctttcattccgttttgcatacggtattccatatttgcttttccaaggtccagatcatatttaatctttgtaaatccttttgcgattctctgtgcatatgcatcatcgacaatcttgatacattcttctgatgcaccgtgtcttcttgctttatctcttaccacatccggaatgttcttacagaagattcccatgtcaggaatgaatccgaagtattttgttccggtgcggtgaatcatctccatatatccatctgcccaacctgaattcaaagagaacggagcatgtacttccagaccgatctttacattcatctgttctgcatactcaaggctaccctctatgacgtccattggtgttgaaacaagtgtacggaggttcttaaatccaagcaatgatgccagacggatatcacgtttcatcatgttaatctgctcactcagagttaacatacggttgtcgtaaatatgattctccaaaaatgcgtcataacaagatggctcaagattatatttcttcatccatccaaaccactgatcacggaattcttctgtctcgatcggcagcgggaatctacggatcatctgctcagcaagaagctcaactcctgttgcgcctgtcttcgcagtctctctcaaacaaccttccaaatctaattttttatcataatactcatcctgataactgtacagggaaacacttcttttaatatcgtaactcatgcttcgttcctccttattcaatcacaaaatctgtctcacataccgcttcaatctggaatggcatgtaagaagggtcaataatctgtactgctttaatgtgatggtttccttttgcaagtccgccttctttcattacagaaactgttgcataatcaccgaattcccaacgataatcagaatcgatcaccgtacgcatctcttccagtgtaaatgtttctccgtttacagtgaaacgtacattttctctttcgatatcttcaccatcaatatttactttgatatctctcacaatagaaagtgtgattccacgataatactgtgctttgaactgaaattcaaagcctgtaagacttccatctttttcaatatttttaaatccttccggattgtatatttgtctgccagccatcttttttcctcctatttcaaccttgacttttctttgaaaatggcagctcctatccatttctcacatcgcatgcgatttatcaggagctgccatattgtttactgattagtcaaagaatacttcttttcctgtctctgctgatttgtaaattccttccagaatctgtgttacaacgaatgcctgctctggctttacaagcggatctgtatcattaatgatcgcattgagccactgctcctgctcgcgaactgcctctgcagctgctccaccttcgaagaagtcaacaacacctgctggtgagattgttttttccatcaactgattgtgctcaactgtgttgtagatcagttcatcctgtggataacttccgccgtggtgaatctcagctccaccctttgttccgcaaagtgttgtagatgcttccatagatttcagaatgttcagtgcccatgaagcctcaaggtagattgttgctccgtttttcatctttacaagaccgaatgcggaatcttctacttcaaatgtcttcggatcccatggtccaaatacgtttccttccggaccatcatcctgacgtcccagtttgtagaatacctgtcctgaaactgactctggctcgtagttgttcatcatccaaagtgtgatatccagtgcgtgtgttccgatgtcgatcagaggaccgccaccctgcagagctttgttcgggaatacgccccatgtaggaacagctcttcttctaagtgcgtgtgcttttgcgaagtaaatttctccaagttctccggcctcacatgatgcatgaagtgtctgtgtatcgtcacgaagtctgttctggtatccaattgtaaatttctttccggatttcttccatgcttcgatcatcttgcgggcatcttctgtattgtgagccattggtttctcgcacataacatgttttccagcctcaaatgctgcaacagtgattgggcagtgagccacgtttggtgtacatacatgtacaacatcaatctcaatgcttgtatctgcaagcatttccttataatctgtataaacttttgcaccttcaacaccatactcttttgctgctttttctgcacgctccggaataatatcgcagaaagctaccatttccgctttgtctgcctgtgttttgatagatggcatgtgtttctggttagcgattccaccacatcctacgattgcaattcttaattttcccattgttttttctccttttatatgtgaattttattttttaacaaattaaataacaaactgtttcaaatatctacggctaagtatcagggaatcctctactttttctttgcttccttcgaatgctctatcctctacttcgatacatgtgcatccgtcgtatccaatatctgtcagtgctgatacatatttactccagtcaacatcccccagtcccggaagcttaggcgacataaaatcaagtggataagccatgattccgcagtcattcaagcgatccggatatactttgatatctttataatgtacatggaagattttatccttgaattcataaatcggtttgatataatcaatcatctgccatacaaaatgggatggatcatagttgattcccaaattgtcgcttttcagaatatcaaatacctgtctccaaatctttggtgttgtcatcagattctgtccgcccggccactgatccggtccgaataacatcgggcagttctcaattgcaacttttacatcgttctcttctgccagtttgatgatagaaggccatacttccttcaccagttccagattttcctccaccgtctttgtctgatctcttccgataaatgttgataccatgtttacgccaagcttatggcttgcacggattacatttttcaagtgagcaactgctgcttcacgtttctcctgatttccatccattgtattcggatagtatgcgagggtagaaatctctacattcttctctttgctatagtccagaatatgttttgcatattcctcatcttccagcactttgtctacatcgatatgagtgactcctgcatatcttctctcagcctttccctgtggccagcatgcaacttccacacattcaaagccgtggtcagatgcgaaatccatcatctcttcataattccatgtgtcaagaatcgcacttacaaatcctaatttcattgtttgtctctccttttcttatttcttgtttcacttttatcttgaattcattatagtccagtacattttcaaaaactttccgcatattatcctaatttgctactgtatttggactcttttttatatcagtcaaatcagaggacaaaaataggggtaatttttttgtcctctgcactatctcatctcaaaccagtcaaattctgcctgttctcactgtccacaccatttccggttgcatatattccgatgatagtttctgacatgcgccattgtcccaaacgtctcctgttcccatgatgtatgcctttccgtcaccatcaaagaaaagcaatgattgtataagacatcctctctcagaaaaaaactaaagtgatccacgcaaaaaaatgctgtatcgcagttattgatacagcatttttttcggtgaaaacaggaactcatcagtgtccatagtctcactttctaatattgataatgaatatccagcgccttgatctcatgtgccatcagctttgtatccactctcagcacaccatcctccacatggattttacgcatctccacctttggcatcgcgccccggcggatatactccacttcacctttggaaagatttttcagataatccatgtcaccccagacatcctgaacgcttccattctcagaattaacatagaacacacgcatgatataatctccgttttctacatggttaatacagaatttcagatgtaccgcatctgtatcctcgtacagctcttccaaatcttcgattctaatatccttctcttccttcatcgtgtatcggtaattaaaccgtttacaattgtgacagacaatcgtatatgtccctcttccatccgtagataaaaccgcattctctgtcttgcccagcaattgcgattgtaggaaattcataaagtgaaatgcataaaacgatggtttcttaatcccatcccttgtcagtaaaccgttatccccgtacagaaccgcctctgtgtcatagtattccgtgtgcaggtctgacccgtgccagtaccccattttatccacatttccgattgactcaatgcaggttttcatcacgtaagccccatgtgcacagctgtcgctgatacagttacggttggaaatggtatagttccattccgtaatatgtagttcctcagccataaactcttcttcctgaagtacctgtttaaaaatatccgtctggtttttcacgaaattattatccagggatcgcttcccgaaatacatactgtcctgctggatcagcagataagagtaggaatacatactgataaaatccggtttcaccttctgttttttccaattctgtatcaattgatggtattggtatctgtcataccccagcgcaaatccggcccctccgactttaattctgtcagaaatgcgcttcaatgcatgatacccgatctcaaaacaatcaaaataccatcctttttcatccatcatattcaatcgatcatctttccacagttcaaaataccaggattccacttcgtccattccatatcgattgataagatgtgatgcaaaatcattcatcactttatcgtaactgtctcggtcatggaaaatgatatcattctctttttctgtaagtgttgaatacaacgtataactaacatgaatcggtttaaaagacagttctatatatggtttcaactgattctccacaagaaaatccaatcctctgtctactctgctgaaattataatgccagcttccgtctttttcctcatacatatcctgcacgaatatattccacactctcacatacctgaatcccagttcctgcttcatgatcagaacctgctgctgcatctcactgtcaagaagtgcgtccaccttcccgatattaataatcgcattccagttttttttcagttctgttgtctcttttgcatctactgtaaacaagtccagattttttgctgccacttcatcctgcggtgccgtattcccggccagatatttcttaactctctgctcgatctgttccttggattctgtatcctgcacttcttctttcgttttctgtcggacacttgtccgatatccagacggcgtcatattataaacttctttgaaaactttattaaaagaagccgtcgtcggaaatccgttatccaacgcaatccgagtaatttttttgtcggtgtacaacatctcatccactgcatgaaagagtcgaatgttattcacatattcaagaaaactcaatccaaacctcttttttatatacttggacagatatgcattggacagatacaatttcttcgccaggtcattcaaactaatctgcttctgataatttgcctgtacataattctgtatctcaaacacgcgggaattatccggcgtcacatcgtccttcagacggctgtcatccgctttgattcgaaaataactattcagaacatacagtgcttcataataaatactgttcagatacagtgcaccttccccttctttatcgtagaatcggttcagcacgcgatccaatattttcctgagctgttcatacgcctcatttttatccgcagtcgtattacaccagaacaagatctgattcgttccgagatattctgccagcatagaaaaattaatacgaaaactagctgtcaggagttcttcttctgtctcccggatcgaatgccgcttatttgcattgatcagcagaaaatcacctttccccaattcatatttttccgattctatctggatttcaagcccgccatccagcacatacagtatctccagatcctggtgaaaatgtgtgttctgcactttctttgtatcaaactcaaaatccatcattgtccgcataatttccatcttttatcccctgaaatagataacttttttacccttaaaagtttaattgatatgctacagatttttaattacctcgactcttgtgacaacgccctgcttcatactgtccactctgagcgcacaatccttgtaatacacacaggctccgattgccacatttttgtcctcctcctgtaatttttcacttatcacatctctaagcagctttgtcttttcctcaggtatgtttgttcctgaaataaaattcgccctcgctaccgtctggctgccacggcatatcatgtggtccgcctcatcaaagctgcagaaaaggaattttctgatggcaaaaagcgctgctatcgcacctattccgacaagtgtctcatatacattgagatgctccacgatcatctgtctggctgtcgcaaacaaaagcacctctatgattgtgcccggcttatgagtacagagcattttcacaaactccacaccgattgcaagcgacatgatatattccatgtaatactccagctcaattttatcatgccatatatcaaaaaagctctgccctataagctttataataagcaccactatcacaaacaccagtactgccgacagaaaaagctccacataggctgcaacatttttcattgtttttctcaggaattgcttcatcatcatttgttcctctcgctttttaattaccggcaataagttttttattgcagtaatttacttttttattatacagggcataccctatataccgcaactactcttttaaattatttgattaatttcatatatataaaactcccacataatggccaaattatgtgagagcctttgcgcgaaaaattatatttttttatgttttctcccgcattctgcgggtatatattttgccagaatactttcatggcaattgggttctaaataaatttgataccaggctccggcaactatttgatgaatcctacctgcttgcagatttcctctgttgctgcatcttttttcttgttgaactcaactttctgctgctcgaaccagttgttaccctctgcatctatagatacgataagtgggccaaactctttcacacggcagttccagagtgtctcaggcattccgagatctctccactctgcgcggacgatttcctcaacctctgttgcggctactactgcatttcctgccgggaatacgcagtgaatggcaccgaactctttacatgcacgctctgtattctctttcataccaccttttccgatgataacacgtacgccggtctcttttacgaactcgtactcgaatttctccatacgcatacttgttgtcggtccaacagataccatctcaaatttgtcattctcaagtggacggatgatcggtcccgcatggaaaatagcattgtttcttacgtctaccggaagctctcttccctcctcaacgagacgtcggtgtgctacgtcacggcatgttgtcatgcttccatttaagtatacaatatctccgatttttattcctttaagatcctctgctgagattggtgttgttaaaattgtttttccattaattctctctaccattataattccacccccgaatgtgttgtgattgtatagttaaggtccttatcaaaaacaatgtgtccgcgtctgtggctccagcagcctacgtttacggctacaccgattgtagatggatgacgggctgtgttctcgatatttacacccattactgagtattttccgcccattccctgaggtccaaggccgatagcattgataccatcctcgagaagtgtttccatctttgcggctctctcgttctcattgtgagatccgattggacgcatgagtgctttctttgataaaagtgctgctgtctcaacagatgttgctacacctacacctaccaggagaggtgggcatgcatttaaaccataagtagtcataacatccattacgaattttgtaactccttcatagccctctccaggcataagtaccatagcttttcccggaagtgtacatccacctcctgccatgtatgtgtagatctcgcatttgtcgctgtttggcacgatatcccagaatactgtaggtgttccttttccaacgttcttgcctgtgttgtactcatcgaaagtctcaacactgttgtgacgaagaggagcctcaaatgtagcttttacaactgcctcttttaaaagtccctcaagctcatcaataagtgggaattttgttccacatttaacccagaactgaagtactcctgtatcctggcagcttgggcggttaagttttaccgcaagctcctgatttctaaacattgtatcatagattgtttttgaaagaggactgtcctctttgtcacggagttctgtcagttttgcaatgacatcatccggtaatttttttgctatatgagcgataaaatttgccatataggtggtaagctgttctacctgtttctcgtttgacatagtttttcctcctaatataaatcttgtaaataattaaatattaatttattgtttacccactcccatccgttcttatgggaagaacggatagaaaatcggcagtaagaccatacttacaatggtcgccactactataagcggaataccggcctttgcataatccttgaaggtgtatcctccggctgtaatgaccattgtgttggcaggcataccgataggtgtggcgtatgcacatgaaccaccgataacacatgccataagtactgcactcgggtcagctccaatctctgtggcaattgatacgcagattggaaccaaaagtgctgtggtggcggtatttgacataaagttcgtaagtacacagcaaagcatgaacactacgaatgtgagaacgtatggtgatggatttttgccaagtataccgataaccgctgttgcgatttcctcgcctgccccggtctcctgaagcgccgctgcaagtgaaagagttccaccaaataagaaaatggttttcaaatctattgatttaagtgcgtttttctcactgataacgcctgtaatgataagggcaagtgctccgacacagccgatgacacaaagctttatgccaatcttgtcctcgaaaatcattcccaaaagtgtaaggattaagataatcaatgacatcatctgtttccatttaggcacatttgaaaaatccttctgctcatcatatgagctttccgtactgccctgcttttcaggcaggaatttgtatcctataaatgcaaagtacagaatacctgctataagtatcggaagtcctacctttgcatactcgaaaaatccaaagctaagtccaatctctcccatagctgattgtgctatgagatttcccggtgcaccgatgagagataaatttccacccatggctgctgcaaaaacaagtggcataagaagtctcgatctcgagtatcctgattttgcagcaattccgataactaccggaatgagaactgctgcagttcctgtgtttgaaagtactccgctcatcagtcccacaatcaccatgattgctatgataagctgcctctctgttttggcgaagtgtgtgaccactcctccaattttgtttgccataccggtttcaaacaatgctcctccgacgataaacatcgctacgaaaagaattacattgctgtcaataaatcctgaaaaagctgttttccaatccagtactcctgtgataacaagaccgacgcatactatcatggatgtaaccccaagcggaatcttttcccacacgaacatcacaacggcaaacaataagaataaaagtgttattgttgctggactcatatctttttcctcctccgtataatatttgatatttgatattgtatccaatttctgagtttaagatataacaaaaaaccgaaatcgtcaatacctttttgacaatttcggcaatttatatatattccacctattcaatttgtgcatctattacaagtaatgtgttaaattagtaacttacatctacacataatatgtcagcatatcatcacgactacgcatgatatgctcatacatcctccgctgtgcaagctgcacatcatgagccttgattgcttcgtatatagcctcatgctcctttatagaaatgcccgcatattcctcctctgtgaccatgctgcccattgaaagtccgttccatagttctgcgatcatattttccatctttttgttgccagatgctgcccagatttcactatgaaactcacggtttaaatccgcatatctgctataatctccggaagcggtcatctcccttgcatccaggtatgactgctctatcttgctgatatcgatatcaggtgaagcagcaaaacctgcacatgcgctctcgagtatgcctctaagctgatagtgctcccttatgtacgtctctgtaattccaagtactattgctcccttattcggtcttagcttgataagtccgtcatgcgctaatatctgaaaagcctcacgcacgggagttatagatacattaagctgctgcgctacactttccagtgtaagattttctccctcttttagctgttttgacaaaattgccttgcgcagctccgatgctacacgctccttcgctgacggaatctttatcggtttaagtcctatcataattactttttcctcttgttatcttttaattttatatgcttccgaatcatctgtcattattcagtataaaataagtcaccaattacctgctgctttcttccctctctgctataacagcctcacaaagacttccaaaatattctcccaaaagttctctgacaatatttatatccttatccgaatatgcctctgctattttcgataacagctcaagtcttcgcgcattttccctgcctgctgccgtctcttcaaccgcaaacctgatatagcaccaaagaccattttcaagaatatgtgtaaaatactcgttatgactattggatataattgtctcatgaaactgcagctctgcagacaatttttcatttatagcagatggctcatgtacgcaattgggctgctcactgttatcactgaccgctttatcccacaaacatataccagactgcagcatgccctttaacagttttatctccacatctgaaagcaactcatagatttccgttatcacctcgtccgaaaaatcagcaaccaccacatgccttgttgccagtctctttgccaatccctgagactcaagtatctgcaatgcctccctgattggtattctcgaataaccgagactatccgcaagctcttcctgtcgcaatggcactcctgatgacatacgtcctgataaaatttcatcctgaatagcttccgctatataatcgcatactcttttatttctcataatatattattatatatgattttggatacaatttccagtcaaacttattacaccgatttatcctaatccctcgtatctgcataatccagatcaaaccctatccacaccttagttccttttccaatctctgactccatgcggattgtatgccccagcttgtctgccatctgcctgcacagataaagcccaattcccgtagccttcttatcggcatgaccattgtagcctgtgtagcccttttcaaaaacgcgtggcagatcctcggctttgattcctattccggtatcctttattgtaataaaaaaccggtctttttcctctgcagtttctattgtaacacccccatgcggtgtatattttatggcatttgaaagtatctgttccagcataaatgcaagccattttccgtcagtatatacctcctgcccggttcctgaataatttatcccaatatgccttcgtatcataatttttgcatattttttaatcgtatcacgtatgacaccatccacactgactttttcaagcacaaaatcattttctgtgctgctcacacgctgatactgcaaagccatactgacatattcctctatgcggaacaattcgtcctctaacgagtccatgttatctgacagctctgtgagtacagcctgttgtttcaaagcagcatttaatccggcagcaccgatattcccaccggtcatatcgcctatatggcactgactctgttcatcatcacatataagctgcccaagctcctcccgctctgcctcaagcagtagtttcatagccgatatcggggtctttatctggtgcacccacattgagtaataatctctcatctgtgattgtctgattgcagcactgctttctgactcacttcttgcaatactttgattttccagcagccgatgataaagcatctccacatcatctgttgcttccggaagctgtgcctgttcctcaaccggacgctttaaagcattgcttagagcttttaccttgctgctatatctgaaaaatccaaccaaaactgttatcagaagaagtattgcatcaagcactgccgcatacaccagatcctgtttgcgcgcaccaatcaggtacatgtaaagcaaatggatacaggtcattgtgactatcatcaaaatccatatatagttttgttttataaaatttgtcagatgcggtttgttttgtatttttgccatgacctctcaccccagcctgtacccaagccccttttttgtgacaataaagctctcaagccctatagaatccagctttttacgcagcctgttgacattcaccgaaagtgtattctcgtccacatacgcatcactctcccacagcttttccattagaaggctgcgtgatacaatcctttctttgttgtcaaaaagtgtctgcaatattttgagctcattctttgtaagctcgagccttttgtcatcataggttatggtggcatcagatatattaagcatggcgccattatgctccaaaacactgttgtttgcgccaaaatcatagcagcgcctgatgatagcctgtatctttacggtcagcacatcgaggtcaaacggctttgctataaagtcgtctgcccccatactgactgccatcactatattcatattatcagcagcggatgacaggaaaaccacaggaacctttgatacccttctgatttccgtacaccagtgatacccattgtaaaacggcagaccgatatccataagcacaagatgcggatcaaatgatgcaaattctgacattacagcatcaaatttctgcaccacatgcacatcataatcccatttttccaaatgtcttctgacaagctttgctatggtctcgtcatcctcaaccaaaaatattctatacattattttccgctttcttccatgataatctcagccgcatcgatgatgagctgtgatgccttcatacgaagtaaatccggcttgagctgtgcctttggaatcacctgctttacaacgtcaacaggctgaccatacttctgtgaaataagctcatactgctcatccatctcctcgtcagatacagtgatattttccactctgatgatttcatcgagaacagcctcaagctttacctgcttctgtgcaaccggcttgagttcatcctttaagctatccatagtcttgcctgtcatctgaagatactgctccatagccacaccctgctgtgcaaatgatgctgccatctgctgaagctgcatatttaccgctgtctctactgcctgtggtgaaacaaggcatgagctgctttcaagaatctggtcatagagcttttctcttgccgcatcagcctttcttgcctctacctggtactcaagatactcgttgatatatttctttaaatcctccactgactgtacctcagggaaattgagagatgctgcaaactcatcgttcaactctgcttccttctcattgtaaatctcgtgcagcttaaccttgaaaacaaccgctttgcctgcaagctccggcgcatgatactgctcagggaatgagagattgatgtctctgtcctcaccgatttccatgcctacaagctgctcctcaaagcccgggataaaagagcctgaaccgattcccagaggatatttctcagcctttccgccctcaaacgcaactccgtccttaaagccctcgtagtcgattactgccgtgtcgcccatcgctaacgggcctgttttctgctctctgacaggatttcctgaaagaagtgtcgctatctgtgaattaacatcctcctctgtatatgcaatataagggatgtttgcctttaatcctttgtaatttcctaatacgatgtccatgattatacctttcttttatgtgtatttatatctgcttaacgaagctgttatatgcaaatagtatacactagttaccaaataaagccaataaaaactcaactctttccaggcttttatatattctaaatatttaagcaccacgtcagatattacaattcaatcaggaaaagaaatgccagtccataataggtcacaactgccaccagatcattcactgtagtgataagaggaccagacgcaaccgccgggtcaatctttatcttgtggaaaaacatcggaatcactgtgcccacaaggcttgaaattgccattgccacaagcagtgaaactcctacacagcctgataccgcaaatgctccaagccatgtgtagcccttgaacagatgcacatatattccgagaaatacaagtgccattattccaagcaagccaccatttacaaggcctattcttacctcttttactacaagcaaaagcttctgcttaccgcttagattctcatccatgagcactctgattgtgacagccagtgactgtgttcctacgtttcctgccatgtcaagcaccagcgactggaagcagatgactatcggcaaagccgctaccacattctcaaatattccgactacggaagacactatcattcccagaaaaagcaggatgataagccatggcattctctttttcatgctctgcagcgtggtttccttcagatcctcctctgcggtcagtccggcgagctttgcatagtcctcacccatctcattgtctaccatctctacaatatcatcagatgtgatgacaccgaggatatgcttatcctttgagagcactggaattgaatcctcagcgtagtccttgattgtgtcgatacaatcatcaattttctcatggtcgagcacatatggatatgaatgggctataatgctttccagattcatgccctccctggctgtgattaaatcctttaaatcaatagctcccgcaaagcattcatctgaatcaaccacatatatagtcatgatattgtcgttttcgcccgcctgcctcacgagctggctcatagcctgcttcactgtcaggccgcccggaatacaaatgtagttggttgtcatatagctgcctatttcatcatcgtcatatgacagaagcatcctgacatccttttccgcttcctcatccagatgctctacaatctccttcttgtcctcatcctccagattttcaagtaaatcgacagcatcatccgaatccatcagcgatactacccttgccgcctgctccacagacagctcatcaaaataggcctgcggctcatcaagatatgcaaaaatctccgctgtccgctgtgttccaaggagcctgtaaagacgtttgcgctccttctcgttcattcctgcaaacatatcagcaatatcattctcatgatagtctgacaaaacctccagaatttccttatccgttttgtggcttctcaatagaacaagaagctcttcgtatttttttgtattcatctccatttctctcctttctcatttcgttagcattttccacataaaataaacatatgtggttctccaaaatcccgtgattctgaagcataaaaatcattccatgatagaaaggacgaaacccgtgcactctataaatttgcgcacgaaaaaagcacctaacggtgccctgatatataaacaagtatgcatttgtgcacagcaaaacacagcacggcgtaagccgatattccttaatatgcctacactgtacctctaaaaactgtccggtgatgaatccttccacggacagaatacactatgcctgccaatacaatactcacttgtatatcagcaccgatgttgttcttacttcgcccaagaccatcactactgtccatgaaattcacctccatacttagattcttaatttctacaattaaagtattaaattcggtatacatcaccggcctgcagatatctgtcacgtccgtaaatcctaccaaactcttaaccgtagaaattgtatcatcaatatacacaattttcaacccattaattatatcttaagacacaccatacctaaattttacaagcacaaaactgcctagatactgtagaaattttgcccataaaacgcagaaatgccccgccaaggacggcggggcaaggattacatgcgccatggacggcgcatataaactatatttttctactggttatctgtcggttcatctgtctccgactcactgtcgtgctccactgcaggatccacatatgtatacgcattctcagactttctaaaaatggtatcactagatccaacctggcacacagttatctcatcaccatcactgatgtcttccttcttgatagcaagcacacctgctgagagataagtcgaagccaccttggagtcgttgatataaaccttactccagttggtaaagttatgaccgtaaatatatactgtatcaccggtcgatgaatcagacacatttgtgatgtccaccttgtcaattcccatgacaagatctgaagccggatataaatctgtgccgttgtagcagtagcgctttccataaaggatatcgtactgtaacaggtcaagtccatcctgatatgatgcctcatctgtgctgttcatctgagtctgatgatagttcatgatagttccctcatggatacctacagtgtctgtagtcttggcaagaagctggtaagcataaaggtcagcatcctcctttggcagtcccatgttgttccatgtgatgtactttgtcttgtagatatcacctgacttcatatcagaattctgaagtcccattgtaggtaggtgatcgccaaacataacaacgatggtgtcctcatctctcttagaaagctcatctgtgagctccttgatgaagcggtcagcctcgttgagctggtttacataatatgtccaggcatttttcatgccctcgtcctcaacacctgatacggtgtatgtaggattttcaataacaggctcctttggatagtcaccgtgagtaccaactgtgatgatataagtaaaatcagactgatccggtgtagcatcaaaggtcttcatagtctcgctgacgagaatatcatctgtaggccagcttccgtttggagtgtactctgtgatattcatgagctccttgcttgtaaaggtgtcaaagcccatcttagaaaatgcattggtacggctgtagaaattaccaccgttgttgtgcactacatgtgttgcatatccaatcttagacaaatcagaggcaatgctctcgcaatctgtctgctttaagatagtcttgtatggatactctcctgtaccgaaatactgcatgctgagtcctgtaagcatctcaaactctgtgttagcagttcctgctccgactacaggtacattcagatatccgcttgaatagtttttctcaagctcatggaatgtaggaataggatcctcattcacctgaaggaaattaatctcgtccgggtcacagaatgactctaaaagcacacagatgatgtttggaccggtctttccgtccactgtggtggtctgcttctgtgaattgaccttctgctctacatcttccacattctgcttattgtagtcctccggctttttcattccacggtccactacagtagatgagaatgagtatacaaagccataatcatcatagccctgggcgatatttgaatagtagctggcaaccacattggtattctgtgccacattggttgtgacagggattgccacgaaaagcagtgctaaaaatgccactgaaacacctgcataacggatttttcctgtatatttaggtcccttgataaaaagagccacaagaaacagtgcaaatgcaccaagtccaactacaactattgtagcctgctgcgctgtgaaataactggtattgttcatggctaaaagctccggaatacactttaaatcagtataaccaaacggtgtgacacggtttgaaagcacacagccgttgatgattccgaggatagtccaaaaacctgtaattattacccttgcaaaagccctgcgcctgaacagatacacaagtgaaaatgatacaaacactaaaaatgaattgtacatgaacgcaagtgtatgtgcatctacgaacttacatgcagagataaagctcctgcgcgagataatctccactataaatacgatagccatagctataattgcatggaataaaagcgaatatttatttaaaaaatcaattctgcgataatatttttctgaatgaatcttgtctttctttacaaagagcttttgtttaatgacattcaatacatcaaatattttcttcatattttcctcctatttgcctttcttttaccttctctttactacatgataatatagacaaaaatatgcacaaaaacaagggcatttttttataaaaattgacgttaaaattattgtttttgggtaaatattgataataaaattaactctttttcccttttttggttgttttcgtaaattttgagtataaaaactattgtttaatccgtgggtaatatgattatgaagccaatggaacgaaatgtaaatagggaaattgcatatttaaagaaagtttaatatttggcagtgcagggcaaatgccgcggattcaggtgccgcagaccacatacccagcagctacgctatgcgattaagattctgtacgaattatgcttaaaggttttctattaaatacaggcatatataccgcacccggcggatatatatgcctgcttcataaagaaatattgtaactatatagatactgaacagttacaaaatatttaaatgtgctcaagtacttcggttgcttttgcgaggtgatcgttttctatgctgtagaaatcacccttatcggcgatagctgcatatgatgtatcgagtggcaacttgccaagtaccggtactgaaagctctttggcgatctcgtctatatggctctctccaaaaagctttatctccttgccgcagtcagggcatttgagatagctgaagttttctaccacaccaagcactgtgatatgcattgcctctgccatgttgtaggcctttttgacaatcatattaacaagctcctgtggtgatgtgacgattacgattccatctaccgggagggactggaatacggtgagaggtacatctcctgttcccggtggcatatcaacgaatagatagtctatatcgccccatgctgtctcgttccagaactgttttactactccggcaatgactgggcctctccagataaccggatcctcctcgttgtccattagcagatttactgatatgagcttgatgccctcttttgtctcatacggatgcatcaggccgttttcgtctccaagtatctggtcatgtgcgccaaacatctttggtattgacggtcctgtgatatcggcatcgaggatacctaccttgtagcccttctttgccatgtttactgccagtgaagatgtgacgaatgattttcctactccgccctttccgctgacaactcctattacatgcttgatgtttgaaaatttattctgctctacgaggaagctctgtggtccgccattatgtgatggacagccctcgcagcttgattttgtgcagcttcccgcgctgctacagctactattttccggcatttttatctccttttcctatgagaaagcaattgttgtatttcacaaaatatatttacgattgcgattacttctcatatcctgtgtttatttatgtgtttatcgttcatatttcatacgacatctatataatgtagtataacacgtatgcagtactttttatgctttttttcaaaaacacccctattcccacctgtttaatcgtatttatttcgtgactgtttcccggaaattcagccaccttttcatgttttgtcactacatatctataatcgtgctacgttttccctttttattatatggatattcacgcagctttacaacataatcgagattctatacacactggttgacaagccatatcagacagacgacaaatgatgacaaaaatcctatatcaaacatcaaaggtagaattaattgatgcataataaatgccggatgaaatatcatatttctatccggcattttcatttataacctcattattttttcgctttaaacttcgttttcaattaaatttactcccattttcaacaaccaaaaccgccaccagcgagcttaccagcagaaacatcggataaaacagatacggcagtatattaaaagctgacacatcatgccccagctcgtgtactgccgatatagccacgagcatctgcgctccatatggtatcatcccctgaaaaatgcacgaaaatgtatccagtatagacgctgttttacgtggggttatatcatatttctgagccatttcctttgctatcggatttgccataactatagcaactgtgttgttggcagtggcaatatcgataagtcctaccagaagtcccataccgagcagtccacctcgtttgcccctgaacgtcctgtaaatacccgaaagcagggcatcaaacccaccatattcacggatcagcgcacacatggctgccacaagcactgcaaccatacaggtttcaaacatgcctgacgctccacttcccatattggcaagcagatcgtatggtgctgtatttcccgttgcaagcattatgaccgttcccgatatgattcctattataagcactacaaatacatttattccggcaattccaccgatcagcacgagaatatacggtactatctgcaacagatgatattcctgcgatacagcgcccgcgatatctgtcctgaatgacagaatcgctataacaaccagcgtcattactgccgccggaagtgcaataaaaaaattctccctgaatttgtccttcatctgacagccctgtccgttacatgcggcaatggtcgtatctgatataaaggaaaggttgtctccgaacatcgcgccacccattacggagcctatacaaagcggcagaccaaagcccgatgcatccgatactgctgccgctatcggcacaatcagtgttatggttccaaccgatgttcccatcgcaatagacacaaagcatgccacaacaaaaagcaccatcaccgcaaaccttgccggtatcaatgacagcatgaaatatgccacgctctccgcactgcttcgacctactacacccacgaatgctcccgcggtaaggaaaatgagcagcattgttatgatatttttatcagccagtccctgtgccattatctctagcttttggtcgaatttcacactacgattctgcagacatgccaccagtattgccacgaggaatgctattatgatgggcacattataaaatcccatcggaattttcattacatattcaaaaagtattcccaatcccagatacagtacaagaaatactgctattggtaacagggctattggattttgttttttcacgtttatatgtttccttgacatttttttagcaattttcatcataagtaatcatcattagtatgtcaataataatatgctatttattataattttatgtaactgttcagtaccttcacagttgtgagccgcaagcgtttcgcgctgagttaaaaggatagcagacatttgtcatactatttcttccttaacccatatcgactataacctctatatattaaaggcaacagtacaataaatagtaagatgtataagaacatcaagaacgaaatctgacgaaatacaaacggaccaatctgaaaaagaattggcgacctcactacattaagtgctaacttcccaagattttcctactcaacgccatcataagttatttgacagcgttgagtttcttttgttacttgctttcagtaattccactgctttttaataaaaataaaactgcgccacagccttggcaggccatcgcgcagcgattttgttcaatcgaaagttgacaaaggaggtgagctgatatgaaaaagaaaatcatcatattgctgtctgttgtgataattcttttgatgggcattgttgtatggtttaatattccactcgacttgatggacttagaccctaatgaggtcatggaaatagttgttttcaatggcaatagcggaaacgcaacacatattaccgacaaagagcagattcagcatattgtcgaaaatttgaatggcgtcgaagtaaagcggtcaaagctatctttgggatatatgggatatagtttcaaagttactatttatttgtctgatggcaacgaggcaggcgattggaataattttattatcaattcagatgatacaattagaaaagatccatttttctattctgttacaaagggaaatattgattacagctatattgaaggtatcgtagaataacaaaaatttcagcttgtcgagctggaaaatttgaatttatgatagcggaacgaaatctgtggagggggtgttctcatgaaattagtcagtccgaaaacattgctggcatcgttgctgggttgcacatttgttgttatgaaagtgatgacttttgacgggctggtggatatgttttggatcatattgatcggatacctgaccgttaaagccatagttacagcgttttcccaggaagcctatgatgaggatataaggcaggcacagcagggaaaggtcttgtaccgtgacctgtttggcaaattcgcatacattgcagcagatgtcccgattcttttgattcttttggcgggccttttggcttcggtctgttccgtaacaacgctactcagagccaccctgatgggacttctgctgattgcagtgggatatgctatctggttcagttggtatgtttcaaagcataaacggctgcgcatgaaaaacggtgagtggggtacagggattttaagtgcagaagacgagaaagcgtggaaacgctcaaatttgtggcacggtataattctcggaattgccggggtgttgtttgctctttatctcattttcggagatccgaggatttatttcaataacgccaaactggaaaaaacactaaccgctttggaatgtgacagcatcactttggaggagattgtcccctttgaatggaccactgtatatacctttgatccctatacctcaaaggaacgcattgagcgagtggtcggttcgaaaagccccgctttgaaagaaagtgtcagcgagggtatgaaccatgttgtgtttataaacagagggcgggtggtggccagcgtctgtacccatcccgcaagcactgggtactatttgagctttaccggcggagaaaatacatattacagttattcagatggtggatattcccacattgagtacggtgatgagattgtctttgaagtaatgcaggatgatggatttgtcaggctgtacgctcgtgttgagaaataatgtgtggtcgcatattgaattattaatggagaggtgacaaacaaagcgagggataaatcccagcttgtcgagctggaaaatatgaatttgaaaggagacataactatgaaagaatatcaacatctaataggtaaaattattatagcgactgcaattatagttgccgcaattattatagcgggtgctatcgatagagcaggagcaaatatccaacgtggtctggggtatttaggagatgcactactacgataaatttagattttggaaactggactgatttgcgaggtacaacttttaatggataaaaaaaagcgactacttattctaatatttgtattaatattaagcggaattgttgtgatattcatacataaaaatggttccatgaaaggagattctattatggaagaaaatgctatttccggagatgataatactcattggttccattcaaacggtatcatcacatccatagataactctcaaaaaaaaatctgtgttgatatcagtcaaaaaaataatttttttgatggtaccaatattacattaaattgcaacaaatcatctctcgacattacatatttagaggctggtcaagaaattactttctatttctttgagaataatgtacttgacactgaagttgcaatagagaaactaaatatcgttacaccataacctttagggattagatagtgttcatctaatcccttttattatgctatgacataatattggcacatctctgtgattgaagtgtaaatttacacatgctacaataagtattgcttatagttttctttattttcagcacctataaatggtgcttttttgtacccgtaattcattcaatcactgacaacttgttctaagtattttatacgtacagcatactttaaccatataccaaacgtaaactgtacatacagccatacgtataacgttttctatttgtatagaaaagatgcggagcatgtgaatgaaattctgaatcaggagaaatcaatctatatttagataagcgaaatgatagaaaacgacatactgcgggatgtgcttttggaggatgagcgcgtgccgagcacaaacgagcttgcaaagctgtatgcgataaatccgtctacagcggcaaagggcataaatatacttgtggatgcaggaattttgtataagaaaagagggattggaatgtttgtgagtgacggagcaaaggaagtaataaggacaaagcggaaagcccgtttttgttaaagttgaacaatataacgtagcgaaaaaacaaaaactagaaaattttcgtctacatgacgaaaaacagtaaaatttttaatgtttatcgaaaaatattctatagtgattcacgaaatatttttgtatactagccttaccaacaaaacaaagggggacaaaaatatatgaagaaaaaatttgttgcaatcatgatggtagctgctatggcagcgtcaatggccgcttgtggatcagatgggggttcttctgatacacagaaagggggaagcagcacaacgacatcagatgttgcaaacaaggacaagccacttgtgtggtttaaccgtcagccatcaaacagctcaacaggagagcttgacacaacagcactcaactacaacaaggatacctattatgtaggtttcgatgctaatcagggagctgaacttcagggagaaatggtaaaagagtatatcgagaagaacatcgatacgatcgacagaaatggggatggagttatcggatatgtacttgcaatcggtgatatcggacacaacgattcaattgcaagaacaagaggtgttcgtaaggctcttggaacaggcgtagacaagagcggcgagattgacagtgctccggcaggaacaaactcagacggaaaagcagctgaggttcaggacggcaagattactgtaaacggcaaagactatgtagtaagagagcttgcttcacaggagatgaagaactcagcaggagctacatgggatgcagctacagccggaaacgcaatcggaacatggtcatcatcatttggcgagtcaatcgacgtagttgtttctaacaacgatggaatgggaatgtcaatgttcaatgcatggtcaaaggacaacaaggttccaacattcggatacgatgccaacagtgatgcagtagcagctatcgcagagggctatggcggaacaatcagccagcatgctgatgttcaggcttacctcacacttcgtgtacttagaaacgcactcgatggtgtagatattgatacaggtatcggcacagaggatgatgcaggaaacgtattaagcgatgatgtatatgtttacaaggatgatgagagatcttactacgcattaaacgtagcagttacagcagataactacaaggatttcacagattcaacagttgtatgggcacctgtttcaaaacagcttgattcaggaaagcaccctacaaagaaggtatggctgaatatctacaatgcttcagataacttcttaagctctacatatcagccactcttacagaagtatgatgatctcttaaatcttgatgttgagtacatcggtggtgatggacagacagagtctaatatcacaaacagacttggaaatccaagccagtacgatgcattcgcaatcaacatggttaagacagataatgcagcttcttatacagctcttttgaaccagtaaaagtatttaaagcacttagttggggagggaaaaatctctccccaaaataaagtgtatacagacgacagcaaatatagagttaggagcaggaagtatgggcgataagaataatgaaaacatcttatcgattcgtggcatgagcaagtcatttggacgaaacagggttcttgaccacatcaatttagatgtgaaaaaaggtactgtaatgggtctcatgggggagaacggagccggtaagtcgacaatgatgaaatgtctttttggtacataccagaaggacgagggaactatatatctggacggaaaagaggtaagcttttcaggtcctaaggatgcactggaaaatggaatagcgatggtgcatcaggagttgaaccagtgtcttgagagaaatgtcgtagacaatctgtttctcggaagatatccggtcaattcatttggtatgatcgatgaaggacgcatgaaaaaagaagcgtctgaattattcagaaagctgggaatgacagttaatctcgagcagccgatgaaaaacatgtcagtatcacagcgacagatgtgtgagattgcaaaagcaatatcatacaactcaaaggttatagtattggatgagcctacatcatcacttacggtacaggaggttgaaaagctgttccagatgatgaggatgcttcgtgaccagggtatttcacttatctatatttctcacaagatggatgagatttttgagatttgtgatgagatttcggttcttagagatggaaatctggtcatgacaaagagcacaaaagaaacaaatatgaatgaactgattgcagcgatggttggacgagtactggagaacagattccctccggtagacaacaaaccaaaggatgtaatcttgtcaatacagcatctttcgacaaagtacgagccacatctgcaggacatcacatttgatgtgcatgagggggagatatttggactatacggacttgtcggagcaggtcgtacagagcttcttgagacgattttcggaatcaggacaagagctgcgggacgagtatattttaagaaccagcttatgaatttcacctgtgcaaaggaggctatggactatggcttcgcacttatcacagaggaaagaaaagcaaatggacttttccttaagggaaatctcacctttaacacaacaatcgcaaatctcggttcttataagaatggaccggcactttcagacagcaagatgacaaaggccacctctgatgagataaagattatgcacacaaagtgtatgggaccggaggatatgatttcggctctgtcaggaggaaaccagcagaaggttatctttggtaaatggcttgaaagaggaccgcagatattcatgatggatgagcctacaagaggtatcgatgtaggtgccaaatatgagatttacgagcttataatcaatatggcaaagcagggtaagacagtcattgtagtttcatctgagatgcctgagatccttggtataacaaatcgtatcggagtcatgtcaaacggacggctctcaggaattgtcaatacaaaggaaacaaatcaggaagagttgctgagactcagtgcaaagtacctataataaagggagaagacggatatggctaatagtaagattttaacggctgagcaggagcgtgctctgcgccagcctatcgacgaatatgttggtggaatacaaaaagaaattgatgcactcagaaaagacggaactacaagggttgtagagtgtcagtcagcgatagcaggcatcaagagagataaaactctttcaaagggcgagaaagagtcagaaatagcagcctgcgagaaagagcttgcaaaggcaaaggctgttgaggcaaagaacagggatgagatttcaaagctcatcgccaaggctgaaagttatttaaaggaaaattttgattcaaagtattacaatgccgttaaggcaagctgtgaggcggaaaaggcagaggcgcttgctgctcataatgagagaatggcagagcttgataaaaagcacaaggctgctcttgcaaagacatcagacagcaccgagataaaggaagaaaactacgtacacaagaatcgtatttcaaatgagaagcttgagctcgagaaagagtatcagacgatcaaggacaaaaagcatgaggcatatagctacaagtatcacctgattgatatgcttcgtctttcaaagttcacatttatggagaaaagagctcagaaatgggagaattacaagtatacgttcaataggagaaacttcctgttacagaatggtctttatattgcaattatacttatattcatagcgctttgtgtcataacaccgataaagaagggcacacctcttctgacatacaacaacatactgaatattcttcagcaggcttcaccgagaatgttcttagcacttggtgttgcaggacttatcctcttaacaggaacggacctttctgttggacgaatggttggtatgggtatgacaacagccacaatcatcatgcatcagggtatcaatacaggctctgtattcggtcatatatttgactttacaggagtaccaacaggtgcaagagtggttatcgcattacttgcatgtatcgtgctttgtacattcttcacaagtattgcaggattttttacagcgaagtttaagatgcatccgtttatttcaaccatggccaacatgcttgttatcttcggtatcgtaacatatgctacaaagggagtttcattcggtgctattgagccggttatccctaacatgattattccaaaggtaaatggtttcccaaccatcatcatctgggcagtagcagcaatcgcaattgtatggtttatctggaacaagacaacattcggtaaaaacctctacgcagtaggaggaaacccggaggcagcagcagtttcaggtatctcagtatttgcagtaactctcggtgcattcgttatggctggtatcctttatggatttggctcatggcttgagtgtgcaagaatggttggttcaggctcagcagcttatggacagggctgggatatggacgcaatcgcagcctgtgtagttggtggtgtatcattcacaggtggtatcggtaagatatcaggtgttgtaaccggtgtatgtatcttcacagcactcacatactctcttacaatccttggtattgatacaaaccttcagttcgtattctcaggaattatcattcttgtagcagttacacttgactgtctgaaatacgttcagaagaaataatattacaagaaaaattctttttcatacttccaaaatgattagcagagatgtcagggtggcatctctgctttttgctttaacaattacacttttgtttatgtaaagctacaaaagaatttatcagatgtggtataatatagtataaacagagtaactattcagaatagttacccggtatagcagggagaagatataaaatgtatacattattactggttgatgacgaagaggatgtaatagaggtaatcgagagaaaggtatcctgggagcagattggttttcatgtggtaggacatgcgggaaatggcttcaaggcgcttgagatgatggaggacatgcagccggatgttgtgatgactgacatacgtatgccttacatggacggacttgagctgtgcagtaacatcaggcagaggtttcctgcgacgaagctcttgcttttcacaggcttcgacgattttgagtatgcaaaggaggcagtacatctcgagatagaggagtatattttaaagccgctcaatatggctgaaatcacggaggtattcaaaaagcttaagacaaagctggatgatgagctgaatgagaagaaaaacacagacatattgaagcagtattatgcagcatcgctgcctgttttgcagtcaaatttttacacgacacttatcgagggacgcataccggaaaatgagctgggcaggtacatgagtgactataagattagccttgaggaaccatattactgctgtattatcatacatacctccgcaagtcagatgccgcagggcatggatatcagactgcttacagtgtcagtagagagacaggcacaggctgatttaaaggagcgctggaatggcaggatttttaactatctcggtgatacggtaatgatagcccagcttgtgcagcaggaggatatctctgagctgacagatgagtgtgacagattttgcaaatatgtaaatcatgtaatgggagcaaaggtaactgtcggaatcggacaggtgtgcgaatgtatacaagagctggtgagctcttatcagagtgcgagggaggcagtatcctacagggtgctttatggcagcaacagggcaataaacatgacagaggttgagccacagcgacgtatatcaaaggatggcgatgagggaaatgagctgtcatatttatttaaaatgatttgtatcggcaagatagaggatgtgggacaggctgttgaagcgtatatgcagcacaattttatgtcgcagcagtcacttgagaactaccatgtggcagtaatggagctgatcagtgagctttatcacttcatgagcaataatgagctaaatgcgcaggaaatatctggaagtgtaggcaggctttataatgagctctccaattttgagccggtagtgctcaagcagtggcttttggatttttcaagcaggctgcacgacgatatggctgatgccagatacaactccaagaagtcactcatagacagtgcaaaggattatgtgcacaggaattacagaagtatggaccttggacttgacgatacatgtaaggaattaggagtatctaactcgtatttttcaagtctgttcaagaaggaaaccggcagctcgtttgtggagtatctgactgattacagaatggacaaggctgccagaatgcttgtggagacagacgacaagagctatgtcatagcccagaatgtaggctatgcggatccgaactatttcagttatgtttttaagagaaagtatggggtttccccatccaggtacaggacagagtatgagaagaataaggtataaaccaggcaatatacaatccataataatgctctcattctcactgctgtcgcttgcaataatgcttgtcacagttgtggtgatgtatataaaatttgccgatgcatcgcaggacagtatcatagagagcaatcataaggtgatggaccagacaatagacagtgtggaaagctatctggtcaatatgaggcaggtttcggatgcggcgtattattatgtaataaaggagaatgatattttaacgcagtctgacaccatacacgatggcatgagcctgctctatgaatcaaacaaggaatatctgcgcagtattgccatgtataatcagtatggaagccttatagctgcagagcctgtcgtgtcccagaaggaggacccggatgtgacaaaacaggactggtttatagaagctatggagcgcatggaaaatatacatttttcaacacctcatgtacagaatctgtttgacgatggttccatgagatatcatctggtcatatcatcaagccgtgccgtggagctgacttacggttcagaatcacagatgggtgtgctgcttgtggacatggattattcgagtgtatcaaggatgcttgagaggataaatacatcgggaaaaggacagtattattatctgtgtgatgcaaagggcaatattatttaccatccgcatcagatacagtttgatggagatgttccggaaaacagcgaggttgcggcaaagtcgcaaaacagtatatatgatgattatctgaatggagtgcatcgtaagattatggtagatacaatcagctacacaggctggaagcttgtatgtgtgatgccatactccatctttaccaataagatggcggatgtgaagcagtttgtttttgttataatgattattatggctatgatgtttgtgtggataaacagagtgatatctatacatatttcaaagccgataatgaagctggatgattctgtgaaaaggtatgagaatggcaatgaagcagatatttatgtaggtggttcctcagagatacggcatctgggatactctatacgcaattcatataagcagaataatgagcttatgaaaaaggttgtatgggagcagaacgagaggcgaaagagcgagcttgatgtgcttcaaagccagattaatccgcattttttgtacaatacacttgactccatcacatggatgattgaaggaggcaaaaacgaagaagcctcgtttatgattacgcagcttgcaaagcttttccgtatcagtctgtcgaagggacataccataataactgtacgcgatgagcttttgcacgcaaaaagctacatgaatattcagaaggtgcgctataagaacaaatttgaggtgagctttgaggtagacgaggaaataatggactactgtgcggtgaagctggtgcttcagccaattttggaaaatgcactaaattacggaatcagagagctggacgatttcggagagatagtggtcggaggccaaaaagtgggagaggatatcatcataacggtatcagacaacggaatgggcattccggagaatgaaattccgcttttgctgacaaatacggacagggttcacaagaagggctcgggagtggggcttgtcaatgtaaataacaggataaagatactgtttggagagcgctatggcctgcatatagaaagtgagcttgatgagggaacagttgtgacaatcaaaatcccggcaattgtctattcagaggaaaacagacttcaatttgaggagcatcatatagtatgaagcaagtacaattgccttgctgcatgggaggggtgagagtgacagtgaaaaataaatggacaaatatgagcaagaataagagaaacttcatcataacagagctgctgcttggagtactacttgtgataggaataggttttatcgcatacaataagctcaatgaaaaaccggagcgtattgcagttgtgatggctgatgtggatgaaagccacagtgctgcgtttaaatatggcatgaaaatggcggcctctgagtatggtgtggatgtagttatgataagtaaggaaaatctgaacaatatgtcagatgaaattgatgtaataaagcaggagataaacaaaaaagctgatgcggtcgttttcaagccgacagcagaaaaaatgacagaagaaaaaagccttaatacacttatccggataaataaaaagacaccgataatggttgtcggagaccaggcgggaagcgagagctttaagtcgttaaatacagtggagtttgaccagtacagcatgggtgcggaactggcacaaaagcttcttgctgacaacaacggaacactttcaggtaaaaaaataggaatctattgtgaaaacactgaatccgatgcctgtaaaaaacgcattgatggcataaaggatactctcgcggagagcggctgtgttgtgatgtggattgtatcaggtgtttcggataccggggagaaaataaatctgcagtcacagagaaaggttgacatagttcttgcaatagatgatgcaagtgttgttgaggcggcaaaggaagcctctgataataatctgcagggtgcactggtatatgggataggaaactcaacagaagccatatattatctcgattcgggctggacagaggctcttatcacacctgatgaatttgctgccggatacaaaagtgttgtaggactggtggatatgctgcgtggcagtagaaaatattcagtagaggaaaagccggtatcttaccagcttcttaccagaaaaaatttgtttgatgaagaaaacaagaagcttttgtatgcaatcagccagtagtgggggaacaataaatgagaagcagaataagaaataccatgatgatactgtgttttgcactgatattgtcatttgtctcgtgcagcaacacaagagttgacgagaaaaaacatatatatataggcgtgacctgttatgaccagaaggatacatttatcggggagctgatagaaactttcaaaaaggagtgcgcaagtcttgatacagacaaatacgatatcagcatgacaatcatggatgctgcaggctcacagcgtgcacaggatgaccaggtgcaggagatgatagaggacggctgcaatgtgctgtgtattaatctggcagacagaacagatttgtcgcatattataaatgctgcaatggagaaggacatcccgattattttctttaacagggagccggttgatgaggatttaaatcgctgggataagctgtactatgtcggggccaaggcaaagcagtcaggtcagatgcagggggaactcattgccgattatataaagaataatccgggtgtggataaaaacggtgatggcaggatacagtacgtcatcctagagggagagatgggacatcaggatgccatcgtcaggacagagagtgtcacagagagcatgaagaataacggccttcagatagaaaagctgagctgtcagatagcaaactggaatcgtgctcaggcgcagaaccgtatgacacagcttataggtcagtataaaaacagcatagagctggttattgcaaacaacgatgcaatggcactcggagcgatagacgcatacgaaaagcttggtgtgacggagtcgaatgtacctgcattttttggagtggacggcacagacgatgggcttgaagcagtgcagcagtcgaagcttgcggcaacagtctacaatgacaaggagggacaggcaagggctatggctcagcttgcttatctggcagccaccgggggcagcatgaaaaacataaagtttgaggataaaaagtatgtttatctgccgtatgagaaggtgacacctgacaatgtaaatgaatttgtgaaggatgaacagtgagcttatttatgctcgttcctccactccctcggagcgactccgtagatatttttaaaggcgcgtgagaaatgaagctgattttcgtatccaacggcagaaccaacatctgcgatggataaggaggtcagctttaaaagctctgtggcctttatcatacgataattcatgagaaattcctgaggtgaatgtccaacggaatttttgaaaattttgcccagatagcttcggtttatgccgcagactccggcaatatcttcgattgatatatcattctgaaaattctgctcgatataattcatcgcttcttttatataaaaatcactcattttcccacctggaacgagttttgatgatttggctgactgcatcagataatccagaaaaaggtacatatgcccaatcaggtgatacggtgattctgaggggtgccttgtgatgtagagcatttcctcaacaagcttttcgcggatatcctttgagtgtgtgtgatatacaggattatttttggtaagctctgttgtggtgagagcctccttgacgcgcagaccgtcaaactcaatccatatgtattcccagggaagtttgtcatctgcgatataggtatttatctggccgggaaaaatcagaaagccctgcccgctttttatgttgtaggtttgtgtaatgccctttgcattatctgccatcagagtgccggtgccggacagtacatagtggaatagatagtggtttcttgtggcaggaccaaatgagtgtcccggttcgcactgctcgtggccgaactggtacatacacaaatctatgaaatttacatttggaaaaatattgaaggaaagtttgtccatgtgagtcactccttattgattaatactataaatatacccttatgcgacattatatgcaattatagcatgttttatagcatattggtataaaaaagcaaaaataaaggtatttattgtatgcataatggtatgttataatcggtttatcaggaaaaagagcaaataaaacagaaaaggagtgaaaaaatatggcaaaaagaaagatttgtcaggctatggcggttgtgctggcactcggaatgtgcactacaggactgaccggatgtggaaatgaaaagcgggcggacggaaaaactgagattgaggtggtttcttataagccggaggctgttaaggctttcgagaagattgagaagcaatttaatgagactcacgatgatattcatctgactatatcatctccgaatgaggctatgactattttaaagacacgcttcatccgtgaggattatccggatatcattgcaataggtggagatatcaattattcaaattttctggatgcagatttgtttgaggatatctcagatctggatgtagtggacactgtaaaagaggcatatctggatatggacaaggagcttgagttcattccaaaggatggcacctatgcacttccttatgccgcaaatgcagcaggagtactttacaacaaggatatgtttgcggagaatggctggaaggtgcctacaacctggagtgagtttacagcactgtgcgatgagataaaggaaagcggaacacttcctttgtatctgggctttaaggatacatggacctgtctggcaccgtggaatgcccttgcagtaggtctttgtgattcagacacctgtaatcaggtaaatatgggaaatacgacatttgaggaggcatattctccggttgccgacaagatacgcacattgcttgattatgcagaggacaatccatatgcttacagctacaatgacgcatgtacagcctttgccagaggtgaatctgccatgtacacgataggaagctatgctattcctcagattaagtcggttaatcctgatatgaatatcggttcatttactttcccggcaaatgataatgaggctgacaatgtgttaaattcaggaatagatttacagctttcagttatgaaggcctgcaaaaataaggaagcagcatacgaggtgcttgaatatctgtacagcgatgagacaattcagacatatctggatgaccagggcggaattgcctgcaaggagggagatttcgcaataccggatacactggaggatatgcaggagtatataaaggacaaccgtatgtcggattatcaggatcaccattatccaagtgagatgagcgtggatgccatgattcagacatatctgcttgacacaggtgacaatgcaaaggagaagttcttaaagaaatttgattcagactggaagcgttacaacagagatctgattcgtgaagtacaggattaccagaaggaacaggaggatgcaaaatgaaaaagaaaatgtcaaatagggacaagacattctgggcagttgtgatacctgttgtggttttatttttcgcattcaacacactgccgatgataaagggtgtgatttacagctttacaaactacaagggttatggctcatatgattatgtcggacttagaaactatacagacctgtttaccgacgccagagtcggaaagagctatctgtttacctttaaatatgcgattgcaggaaccgtacttgtaaatgtattaagccttgtaatggcagttgcgttaaacagcaatatccgcggcaagagtgcattaagaggtgtttatttcgtaccgaatatccttggcggactggttattggttacattttcagctttatttttacatatattctgccggtagtaggaaataccttcaacatcggtttcttacaaaacagtattctggcgagtgaaaaatatgcatggattggtgtgctgattgtcggggtatggcaggcagttgccatgaataccatcatttatatatccggactgcagacagtgcctgaggatgtttacgaagccagcatgctcgacggagcaggcaaatggaaacagttctggaaggttacatttccactcgttatgccgtttgttacaatcaatctggtgctcagcacaaagaacttcctcatggtatttgaccagattatgtcattgacaaagggcggcccggcgcagagcactgagtcaatctcatacctgatttacagaaatggtatggatggaggacagtttggcttccagagtgcaaacgcagtaattttctttgttgtaattgtggctatttcactattccagatgggtattatgaataagaaggaggagcagttataatgaaaaaacaaaaaacaaactgggtactaaccatcgttttaatattgggaaccttaaccgtatttttcccgctgtatatggctgttatcattgccttcaagaaaccgagtgagatgacaaatgatgtcgcaggagctctttcattcccttcaaagtggagcttttcaaacttcacagaggctatgaaggtgactgatttctggcattctctcggaaacagcttacttatcactattgtgaccattgttctcgcaatccttatccattcgattgcaggatatgttatcggacgaggcatggcaaggaaaaagagcttccgtttcatatatctttacattgtaagcggtatgtttgtgccattctcaattctcatgatgcctcttgtaaagcagactgcgcagatgggacttggaaacagggcaggagttatcattttatatcttgtattttacatgccaatgaatgtattattatatagtggatacttgaaaaatatccctatggcacttgaggaggctgcagacatcgatggcgcaagcacatggacaacatactggagagttgtatttcctatgatgaagcctatgcatgcgacagtagccatcctgacagcgctcggtacctggaatgatgtcatgacaccgcttgtcatcatgtcaggaacaggacagaatacactgccgttggcacagctgaatttccagacacagtttggaaccaactacaatctggcatttgcatcatatattctggctttgataccgatacttatattctatataatctgccagaagcagatattaaacggtgttgcaaacggtgcaatcaagggataatttttaaacactattttaacaataatatgaggtgattttatggcaattatatttaatccaaacaagaaaatttttactttacagacagctcacaccacatatcagatgcaggtggacagactaggctatctgctgcatctgtactacggagcaaaaagcacatgtgatatggactatgtgctgacatatgctgacagaggcttttcaggcaatccttacgcagcaggcatgaaccgtacatattcgcttgatacgctgccacaggagtatccgactcttggcacaggcgatttcagaaatattgcgcttgatatcaaaaacgaacagggcactgagagtgttgagcttctttataagagtcatgaaatcagagacggaaaatacgctctaaagggacttccggcagtgtgggcatctgatgatgaagcgcagactcttgaaatagttcttggcgatgatatcgcaggcgttgaggtgcatctgctttatggcgtgctcgaggcttgtgatgtcatcacaagaagtgtgctcattaaaaatacaggtagtagaaatattacaattgaaaaggctcatgctgcctgcctggatatggtttacggagattatgatgtgatcagattctacggtaagcatgccatggagcgcaatcttgagcgcacacacttaggacacggcacactttcattcggaagccgcagaggaacctcgagccaccagtacaatccggcagttattctcgcacagcgagatactacagaaaatgcaggagactgctatggtatgctttttgtatacagtggcaacttctcatgtgaggcagagaaggatcagattaaccagacacgccttttaatggggctttccgatgagctgttttcatatccgcttgcggcaggagagacctttacagtgcctgaggtgattatgtcatactcggcagacggtttctcacagctttcacatcagtaccacacctgcatcagtgagcatgtgtgcaggagcagatttgcacatgaggtaagaccggtgctcatcaatagctgggaggctgcttactttgactttaccggtgatacgatagtagatcttgcaaaggaggccgcatcactgggcatagatatggtggtcatggatgacggctggtttggaaagagagatgatgataattcatcactcggagactggtttgtgaatgagaaaaagcttggaggaacgctttcagagctcatcgacagagtgcatgcacagggagtgaagtttggaatatggattgagcctgagatggtaaatgaggacagtaatctgtacagagagcatcctgactgggctatccggattccgggaaagcttcctgtacgctcaagaaaccagcttattttagacttttcgagaaaagaagtcagggacaatattttcgatcagatctgcgcagtgtttgaccagggaaaaatcgactacgttaagtgggatatgaacagaagcatggctgatgtgtatgcaggaaatcttgcatacgactatgtgcttggagtgtatgattttatggagcgtctggtgacaagatatccggatatacttcttgagggctgcagcggtggcggtggacgatttgatgcaggcatgctctactacagtccacagatatggtgcagtgacaatacagatgccataaaccgtacaagaatacagtatggcacatcgttcttctatccggtatcatccatgggagcgcatgtatcggcagtgccaaatcatcagacaggcagagtgacaagccttaaaacaagaggcatcacagccatggcaggaacctttggctatgagctgaatccggcccttctgtcagatgaggaaaaggaagaaatcagagagcagataaagacctttaagaagtatgagatgcttataaatgagggcacctactggcgccttacaagcccatttgaggatgaggtggctgcttggatgtctgtctcaagggcaaaggacagggcacttgtgagcgtggttcgtctgtatgcggaggcaaatgcggctacttactatgtgaagcttaagggcttggagtctgatgcagtatatattgaggaaaataccggcaggcagtacacaggtgcagcactgatgaatgccggaataccgcttccgtttgctacaaaggagtatgaggcatatcagttttcatttatcaggcttgatgaggcaaagaagctgtatgatgagataaagaaggtgtgcggcaatctaaaattaagtgaggctgacactgcagatagttcttctgataaacgtattgtaataagcatctacggcggctcaggctcaggaaagacaacgattgcagcagccctgcagcagtatttccttaacgataatacagcctgctatgtgctgaccggggacaattatccacaccgtatcccgatgagaaacgacgaggaacgccttaatgtgtataacgagtccggcgaggatggcttacgtggatatcttggaacacctgaggagattgactttgacaggattaacaaggagctttcagagtttaaggcaggaaaagatataattgagataaagcatatgggccgcgaggacggtgatatctcatatgacgagactgatttcacaggaatcaaagtgctcatcctggagtggacccatggaggaagcgaataccttaagggtgttgatatacctgtatttctggagagttcgcctgaggagacaaaggcgcgccgcattaagagaggacgtgacgaaaacgccgcaagccctttcatatgccgcgtggtagaattggagcaggaaaagcttgatttacagggtaaaaatgcgcgtatcgtagttggaaaggatggcaaagtctatgaacaataaacctatgcttaatgcatatcctgacagtctgggcggtaagctttccgatatcgcagcgctgctaaaaaagaaggaaatgcaggacacattttcatcattttatattctgccaagcctgtatcattcggatttggaccgcggattttcggtcgtggactacaatctgaatgaggagcttgcgacaatagaggatttatcgcaattgaaggagctggggattgacttaaagcttgactttattttaaatcatgcttcggcacagtcaccacagttcaaggatcttgtggaaaagggcgatgagtcggagtaccgcgactttttcatagactggaacaaattctgggaaggtcatggagtcatgacggatgagggctacatacagcctgatgagtcatgcttaaagcagatgtttttcagaaagccggggcttccgattctcatggttgagtttccggatggacgaagagtgccatactggaacacattttaccaggaggtgcatggcagagagtatctgggacagatggatttaaatataaagtccgaaaaggtgtgggatttctatcgtgaaacactggaaaaaataacatcctacggtgcggctatcgtgagactcgatgcatttgcctatgcgcctaaggcaccgggaaaaaagaattttctgaatgatcctgagacctgggaatttctacagcagattcacgagcttgcagcaccgcttggactgactctgctgcctgaaatacacgcggcatatgaggaaaaaatatacaaaactcttgcagataagggctatgccacatatgatttctttttaccgggactgataattgatgcgattgagaacaggagagcagattatctggcgaaatgggcgcgtgagattgtggaagataaaatctcaacagtcaatatgcttggctgccatgacggcatacctcttctggacttaaagggtctgcttccggaggatgatatacgctcgcttatagatttgattgtatctcgtggcggcatggtcaaaaatcttcacggacagaagaatatatattatcaggtcaatgccacatattacagtgcgcttggtgagtctgacagcaaaatgcttctggcacgtgccattcagatgtttatgccgggcaagccgcaggtatggtatcttgacctctttgcaggcaaaaatgaccatgaggccgtaagacgcgccggagaatcaggacacaaggaaatcaacaggacaaacctcagtgtttccgatattggggaggcactaaaaaaggatgttgttgcaaagcagcttgagctgcttcgcatgagaaatacccataaggcatttgagaagggggctgtcatcacagtagcaggagaagggccaaagctttcaatccgctatgataacggtgaagcatatgcgcttctaacggtggattttgaagccggagcgtatgagatagagctgagttgatgaaatcagattactcatacataatgtgtttagcagatgtgcaaactcacaatcgaaaaaacgattgtgagtttttttatgagaaaaatcatttaattgactcgtaaaagtatcggctataaggtataataaagctatagaaaagacaggtatcgaaaaggagcaggcactatgggaacatatctgaacagcataacaccatatacattgtataaaagcgagagcttaagtccgtattttgtggataaaacacttatgcttagagaattgtttccgtatgtaagtgcaggaaatcgtcatatttgtattaccagaccgcgtagatttggaaaaacaattatggcaaatatgattagctccttttttcagaaagcatcggattcgagtgatgtttttgatagtcttacaatatcacaggtggatgactatagaagatataaaaatcaatataatgtcattcgcatagatttcagtaaattgccaagaaactgtgattcatatacacaatatatcgagcgcatagaagcacttttgattgaagatgtaaaggaagcatatccacaggttaaaataaatgaggcagatgcaatcggagacattcttgagagtgtatttgtgcagtgtggtgagaaatttatatttgtattggatgaatgggattttatattccacagagattttataaatgagattgataaagaaaaatatgtggcatttttaagtaatcttttgaaggatcgcccatatgtggttctttcatatatgacaggcattttacctattgcaaaatattccagtggttctgagcttaatatgtttgcagagtttacaatggtaaattcaccgatgtttggagagtattttggatttaccgatgatgaagtggatgatctgtacagacgctatattgtagagtgtgacaggcagcataaggaaaagagcgtgacgaggaaaggactccgtgactggtataatggttactatacaaagtcgggggaacgtgtttacaatccacgttcagtggtatttgcattgcagtttaacaatcttgcaaattactggacaagctcggggccatatgatgagatatattattatatcagaaataatatttctgatgtcagggatgatctggcacttatgatatccggtgagtccgtgactgcaaaaatacaagagtatgcggcaacatcaatgaatctttcaacaagagacgagatatattctgcgatggtagtgtatggatttttaagctatcttaatggaaaagtgtgcattccaaacagagagctgatggagaaatttgatgagcttcttgtaaaaaatgagtcattgggatatgtataccgtttagcaaaagagtccgagaaaatgcttaaggcaaccttggcaggggacacgctgaccatggaaaggatactggaatttgcgcataacacggaggtgcctctgctatcgtataatcatgagacagagttatctgcaatagttaatctggtatatcttgcagcaagggacagttatcgtgtggagcgtgaggataaggccggaacaggatatgtagattttattttttatccatatgatacaactgcagattgtataatccttgaattaaaagtagatcatactccggatgaagcaattgcacaaatcatagataaaaagtatgcacttaaatttatgcctaaacttgcagggcaaaagatatacacaggaaggatacttgcggttggaattggttattggaaggaaagtaaaaaacatagctgtaaagtggaagaaatattgaaataacaaaggagaacgtttaaagatgataagaggtgataaaggctaatggaatacgagcacataacccactcctttaagcctgtctatgacgaaaacagccgaatcctcatcctcggaacgcttccatccgtaaaatccagggaaaacaatttctattacggacacaagcagaaccgtttctggaagctgcttgcgtatctcttggatgaatcggtgccggagacgatagatgagaaaaaatatatgctgtttaaaaatcatatagctatatgggatgtgatacaaagctgtgacatcaggggttcgagcgacagcagtatcaaaaatgtaacaccaacggatataagaaaaatccttgaaacatccgatataaaacagatatatgcaaacggaaataaagcaggggcgctttataagaaatatcagcttcctctgacaggaatggaggcagttacattgccgtccacaagccctgcaaatgcggcatggtcatttgaaaggctatgcgaagcatggtcacggatacttgtaaacctttagagatttatatatagaggtaaaatttacttatgaaaacaatagaatttgatacacatttttacaaaaagctgtggacactcatggttcctataatggtgcagaatctgatgctggcgttagtggcggtggctgatgctttcatgctcggaggactggaccagaactatatgtcagcagtttcgcttgccacacagatacagttcatccagaacatgtttctttcagcagctacagcagggcttgcaatactcggagcacagtattggggcaagcaggacataaaggcgctcgatgacatattcgctcttgcaatcaggatatgtggcatagtatcggtgctgtttttcgtggcatgtgcaatttttccacgatatctgatgcttattttcacaaacgagccggtgcttatagattatggtgtaagctatctgaaaatagcttctttttcatatttattgacaggtttttcgcagtgttatatagtcatgatgaagatatcagagcacgcgggtactgcggcggcagtcagctcaattacagtgcttataaacataatgctcaatgccatatttatctatggtgcatttggcatcgagagcatgaatgtgaggggagcggcacttgccacactcatatcaagagtagtggagcttatgctttcaatcacattttcgtacagaccgggatatatcaggcttaaaatccgggggctttttgcaaggaacaaggagctgtcagcagattttatgaagtgctccggaccgattctcggagcaagccttgtatggggaataggctttacatcgtactctacatttatgggacacatgggaacagatgcggcagcggccaactccgtcgcagcggttgtgcgtgatatcatttgctgtctcagtgcaggtatatcaagtgcagcaggcattatgataggaaatgagcttggcgcagggaatttaaagcgtggaaaagcatatggcatcagaatggcaaagctgtcatttttgtgcggagctgttatgacagtgcttatggcggtttcagcaccggtgattttacattttgtaaagctcacaccgcaggctgcagagtatctgaagcagttattcggtgtacttgcattctacatgattggacgatcggtaaatgaaataatcataaacggtgtctttggttcgggaggagatacgatgtttgatatgtactctcttgctgttacgatgtggggcatagcaataccgcttgcagttgcaggcacatattttttgaactggccggtggttgtggtgtatgcgtgtacctgcgtggatgaggttggaaagataccgtggacactcatacattttaaaaaatacaagtgggtaaaagatttgacaagataatggaaaatgtatgaaaacaagcgtgtgcacagggagtagatcggatttagcgctaaactgatttgaacaaaaagaggatattgaattgcggcatcggctgtcaagggataacgtaatttatatgagagggggtatttcatgcaggaaatatacagagtaaagacaagtccggtggcattatcggacaatatgataataggtgaaaaatacaggattacattactgacagaggcgcttgtccgtctggaatacagtgaagatggcgtattcgaggatagggcaacacagacagtattgttcagggattttccaaagaccggctatcatgtggtgcgtaacgctgatggaattgaggttcatacatcaatgctgcacctgatatataatgagaaggagttctcatcacacggactgagtatacagattaagggaaacctgagcgcatatcacagcatctggcattatggcgagaaggtgcatgatttgcagggtacagcgcgtacacttgatgacgtaaacggagaggttgagcttggacacggtgttgtttcacgctttggatattcaattcttgatgacagtaaatcacagattttacttgacgatggatggattgagccaagaaaaaaaggtgtgtctgatttgtatttctttggatacggacatgattataaacaggcgctcaatgatttttacaggctttgtggcaagactccgatgcttccacgatatgcactgggaaactggtggagcagatattataaatactcagaagaaagctatatggagctgatggacaaattcgatgaaaagaatatcccgttcacagtagctgtaatagatatggactggcatcaggttgatgtggaccctaaatacggaagcggctggacaggatatacttggaacaaaaagcttttcccggatccgaagcgctttcttggaaagctccatgacagaggaatgcatactaccctgaacgtacaccctgcggatggtgtgcagggctgtgaagaaatgtatgttgatatggcaaaggaaatgggcgtggactatgaaaatgaggacccggttgtatgtgatccggcaagcccaaagtttatggatgcatattttaagtatcttcaccatccgagagaggctgaaggtgtggatttctggtggattgactggcagcagggcagcaactgcaaggttgaaggattggatccgctatggatttttaatcattttcattatctcgataataaaagagacggcaagcgtccaatgacattttcgcgctatgcaggtccgggaagccatagatatccgattggattttcgggagatacacatattacatgggagtcgcttgattttcaaccgtattttacaactacagcgacaaacatcggatatggatggtggagccatgatattggcggacatatgcttggctacaaggatgatgagctgacagccagatggacacaatacggtatattctctccgataatgcgtctgcacagctcatgcagcgaatttaacggcaaggagccgtggcgatttaaaaaagagactgaggaagcgatggaggcggcgctcagacagaggcattgtatgattccgtatctgtataccatgaactatcgcagctatgccgagaatatgccgctgattgagcctatgtattatgagtatcctgaaaatgcagaggcttatgaggtaaagaatcagtatttctttggcagccagcttatggcagcacctgttacaactccacgtattaagggacttaatgtggcaaaaaccaaagtatggttcccggagggcatctggtatgatatctatacaggcatgcgctatgatggtggaagaatgctggaggtttacagggatttgagcagcataccggtgtttgcgaaggcgggaggcatacttgtgtgtgcagatgctgatgagcttgatgcaagatctgttatcaaaaatcctgatgtattatgtgtcagagtattcccggaggctgatggtgagtttgagctatacgaggatgacaatgaatcctgcggatatgtagatggcagatgtgtgaccacagctatgaaatattctgcggataaagatatgtttgtcatttctccggcagatggagatacatcattaatacctgacagcagaacctataagcttgtctttgaaagaagaaccgaggcagcagccgataaggtaaaggtatctgtggatggtaaagaggtattggcaaagagtaaatatgataaagaaaacagaaagctcatcgttactgtaaatgcatcgacagcgagcaaaataagcgttgcaatatcgaaagacacagtagcgcttgataatcaaatcgaaaaaagatgctttgatttcctgaatcaggcagagataggctttgttctaaaggatgaaatctacggtcttattacatcgggaaagaaaacaacagtgattttatcagagctcaaggcaaaggagcttgatacagagctgtatggtgtattgacagagatacttacagcctgagccagtcaccggtcatactaggtgtgaccggtgactttctttgttgtaaaaattaaaaatggatgatactattatagtaaacagaagtttttttataagaaacatcaggagaaactatataattcaagggaggattatgcaatgagaaattcatataagaactgtaaaatacaggacaacacagcagagctgatctacgagaacggcagtctgtttgttaccatatttgaaaacaacatagtgcatgttgcacaaaaacccggcatcgaaagtgttgcaatagaggagggctttattccgaaggctgccacaccggacgtgacctgcaaggatacgtctgatgccaaggggaacgcagcagaagccggtgtaagcgatgcagcagttaaagcagtcatcagagcaagggatattactgtaaatgtaaaggataacgagaagcttgatatttattacaaagggaagcttgtgctttcagattatgaaaaagcacgcaaaaagagtgagaagaatccgtacgaggatcttgccatcgcagagcttgagggacatactgtcggaaaagatgaagaaaaaactgactctgttaccattatcaaaaagcttggaaaggatgatgctatttacggtctgggagataagccgggatgcctcaacaagcgtggatattcatatgtaaactggaacacagatgatcctgcgccacatgtggacagcttcaaatcactgtataaatccataccgttttttatcgtgttgggcgatgaatattgctatggaatttttgcggataatacctacaagacaacctttgattttggttatgaaaacacagattactatttcgtcgagcatgagaagggggagctggactactattttatgccgggaaatgatatggcagaggtggtaggactttatacatcactgacaggcaccacaccgctttatcagagatggatatacggcagccatcagagccgctggggctattacacacaggatgaggtgcttgatatagctgacaaattccgcgagcttgatatcccatgcgatgtgatacatatggatatcgattacatgaacggctacagggtattcacctttgatgacaagaaattcccggatgtaaagggcctttcagagaagcttgctgacaggggtgtaaagctcatatccatcattgacccgggggtgaaaaaggatgaggactacttcatgtacaaagagggtatggagatggatgcatttgcacatgatacagatggcagtgtatatgaaaatgctgtctggccgggaacatcggtatttccggacttcacaaagcaaagcgtcagaatctggtggggagacaagacaaagatacttctcgagcacggtatcagtggcatatggaatgatatgaatgagcctgcaagcttcaacggaccactgccggatgatgtgcagtttgagtatggagcacatgaaaaggttcacaatatttacggacattttatggcaaaagccacatatgagggacttgcgaaaaatgatggtggaaaacgtccgtttgtacttacaagggctgcatatgccggaagccagaaatactgcggtggctggaccggagataatcacagcatctgggcgcatatagcactttcactcgagcaggtgtgcaatctgtcagtcagcggacttgccatgtgcggcagcgatataggcggtttcggaagtgatactacaccggagcttcttgtcagattttatgaggcagcagtatttgtgccgtttttcagaaatcattcagcgatgggaacacgcagacaggagccttggcagtttgacgagactacgatagatgcagtcagaaagacagtaaagctcagatacagatttatcccatatatatatgatctggcacatgagtgtgaaaagacaggagcacctatcgtgcgcccgctcgtatacgaatatcctgcagataagcatgtgagaaatatttccgatgaatatatgctcggaagctttgtactggttgcacctgtgatcgcaccgggcaaggaggcaagagaggtttatctgcctgacggcgactggtatgattactacacaggcgaaaaatacagtggcggcagatatattttagcagatgcaccacttgataaagtacctgtcttcataaaagcaggagccattatccctgtagcagacggagaaatccgctctacagaggacattacagaggataagatcagtatactgacatatccgggcaagggcagcttcgtgcattatcaggatgacaatgagacgttcgcatacagaaacggtgcgtataatgctgttgagtataccctggatggggagacgctcgagaagagggtgttgcataagggattgtaaaaatacataaacttaaatttaaaattcaatatcaacctcaacagggcagtggtctgaaccgagtacatcggtatggatcgctgccttttgcagcttatcattgatgcgctttgatgtgataaagtagtcgatacgccagcctgcgttcttctcgcgagccttaaaacggtatgaccaccaggaatatataccctcgacatccggataaaaatatctgaaggtatcggtaaagccggaacctaaaagctccgtcattttagcacgttcctcatctgaaaaacctgcattcttgcggtttgtttttggatttttcaggtcgatttcattgtgtgcgacattcagatcaccgcacagtacgacaggcttttgggcatcaagagccttaaggtattcacggaaatcatcctcccactgcatacggtacggcagccttttcagttcattctgtgagtttggagtgtaacaggttacgagatagaaattgtcatattcgagtgtgatgacacgtccttccctatcatgctcctcaatgcctatgccgtaagacactgataatgccttgtttttggcaaaaatggctgtgccggaatagccttttttctcggcgtaattccagtactggtgatagcccggcaggtcaaggtcaatctgtcccgcctgtagcttggactcctgaatacaaaagaaatccgcatctatactgttaaaaaaatcaaggaaacctttctggacgcatgcgcgcagtccatttacattccacgatataaatttcatgtcttagtcctccatatcactgcaatctcctaataaaataacaaaatcgcattttctttttggcaattttactacaaaatcgcattttttaaaagaggtttgtatctgcagattgaactttttccataaaatacgtatagagtaagaaaatacgcaagtaaaatttcttacagcacatcgcttccatcaggaatctttgagatgatagttcggttgatcctgattaagaataatgtcgaaacagtaaaggatatcacctctgctatcgggaaagcccaccatacagcgtgaagtccaccaagctttgaaaggatgtatgctgccggaattaaaaccacaagctgacgcatgattgatacgatcatggaaaagactgcttttcccaaagcctggaatactgtgccgacgataatacaaaaccatgcaatgaggaaatgcactccgattattctgagcgccggaacaccgattttgagcatatcgtcagaggcgctgaacattccaagaagcacctttggtatgaactcaaagcaggcaaagccaacgaagagcagacagaatgcggttatcaggctgacctttattgtcttaaccatacgctttctgttctgtgcaccgtagttgaaggcgatgataggtgtgattccgttgttcagtccgaatacaggcataaagaagaagctctgcagcttgaaataaacaccgaaaacagcagcggcagtcgatgaaaagccgataagtattctgttcatggcatatgtcattatagagcctatagactgcatgatgattgacggaataccgatagcataaatggttcccatgattttgaaatccgggctatagcccttgaagctcagcttgatatcatgattgaatttgtggttgcaggcaaaggcaacaacggcggctacgcactgtcccacaacggttgccacggctgcaccggtagcaccgagcttagggaagccaagcagtccaaagatcatgataggatccagaatgatatttgtgatggcaccgcaaagctgtgaggtcatgctgaaaatagttcttcctgtcgatgtaagcaccctctcaaaaaagatttccgcaaaaataccaaatgaaaaaatcataacagtactcaggtagctcacacccatatccatgatttcgacatcagcatttccaatctgactcatgtaaaaaggctttacgattgtaagtccgagaatcagaaatattacgtagctgaatgcatatagtacggcaccgttgatgccgattttgttggcctcgtcgtatttatgggcgccgagtgactttgacagcaacgcgtttacacctacacctgtaccggttgcgacagcgatgatgagtgtctgcaaagggaaggcaagtgaaactgccgtgagtgcgttttcggacagctttgcaacgaaaatactgtccacgatgttgtatagagcctgtacgagcatggaaatcatcataggcaaagacatgttaaagacaagtctgcctataggcatggttcccatcttgttctctgttacaggggctgaatttgtttcctgactcataattcctcctattgtaaatgattgtaatttaaacttccggcattatatatgtaggaagctttagttattaaaattaaaatcaccggtagattagccggtgtttaaaatgtgcaacaaagcgccaattacatataataccatgactgcaggatactttcaaggtattatataactgttaaatcatatcataatagttaatgaaaaaatgcctcaaaaagtatagcattgcagggtataaattacaataaccgcttgacaaaatgacagagagatatataattagttcaaaaatgaataattcaaaaatgtataacaaagcagcaaaataggaaaaggaaagaaggaatatcacatatgaaatttaactttgagtttgcagagaaaatttcgcgaacctacagtgatgagtgcagaccactgtgtcatgagctaaagcttccacagacagcctttgatatactcatgtttctggcgaacaatccggaatataagacggcaagggatatagttgaaataagaaaaatcaaggcaaatcttgtgtctgtaaatgttgataagcttgtgaatgaaggctatttggagagaaaacctgtggaaaatgataggaggaagacggagcttgtctgtacaaaaaaggctgggactgtcattgaaagaggaaggcgtatacagcagcagtttacagcagatctgtttgcagggatagatgaggagcagaaaaggcaactgacgattgttatggaacagcttgagaataatatggatgaaataatcaggaggaaatcacacaaatgagcacattaataactataatagtaacattttttgccggtatgggcgcaggccttggaaccggctttgctggactaagcgcagcagcagtaataagccctatgctcattacatttttgggaatggacccttatatggcagtgggaatagccctgtcgtctgatgtacttgccagcgcagtgtcagcctatacatatggaaagaacaagaaccttgatgtaaaaaacgggctcataatgatggtaatggttttatgcttcacggttgtcggaagctatgtatcaagccttgtgccgtcagcaacaatgggcagcttttcggtatttatgacatttttactcggaatcaagtttatagtccgtcctgtcatgacaacaaaggaggccatgcagggagtttcagctaaaaagagagctatccagtcaatcatctgcggtgtgcttatcggatttatctgtggcttcataggtgcgggaggcggtatgatgatgctcctcatcctcacatcagtgcttggctatgagcttaagactgcagttggaacgagcgtatttatcatggcatttacagcctttacaggagctgcctcgcactttgccatcggtggaaaaccggacgggtttgtgctgattttatgtattgtatttacactcctttgggcgagaattgcagcggtctttgcaaacaaggcatccgcaaaaaccttaaaccgtgccacaggtattgtgcttgtaatacttggcatcgtggtatttgcattttcacttctgagctgatttatcctttcggtaattgtaaaatatttattaaaaaaatataaacgcgcagttcgaaattttatcactttagttatggcttatcaagtgggaaaataaataattagtgaaacagctctacaataaataccgccacacaggaagccacggcgacggttgtaagccccttgccctttaatgcaaatatcactgccgcgataagtcctgctgctgcaccaacccaccagttagtagcataaaacactgccggaatagtcatggcggttaaaactgcatacggaatatagtatagaaaagatcgcacgaagctgttgttgatcttttcttttattgcgataaaaggaataacgcggatcagatatgtggagcccgcgagtatgagtaaatatataaaaaatacactgtttttcattatgtaaaatctccttatacgcttattatcaaatatttaataaatcattccttatcagtatcatctgcaaccggaaacagcagcgaaccgataactgcagccacaatggctacaacagtgatggtgataccgcttgaaatccttgacaaaaacggtacgtagtaaaacatgcagctaagcacgagtgcaagcagcacaacaaacacgactgcacgcgatttcttcatctcaggaaccacgatagccacgaacatgccataaatagcaagactcagcgcactcataagcctatccggcagaatgcttcccagtatagcacctatcagcgtaccgacagcccagcctatgtatggaagagttgaaagtcctgcaaaaaagcttctgctcacagaatcctcctggcttgccacggcaaaaatttcatcagtcatcataaagccgagtatccatctggaaattccgctaaatctggaatccgccttctgtccaaccgaaatcgacataaaggaatatcttatattaatagtaatctgtgaaataagcatctggaaatactgtcccggatgcatcataattccgatgcctgcaaactgtccggcagatgtgacagtggtcatcgaaatgagcacagcctgccaccaggatagtccatatgacaccgccataattccaaaagtaaatgaaactgacagatatcccagcgcaatcgggattcctgctgtcagtcctcgtttatagtttttcattctaaattctccttagcataatataacaacatgttattctagcataaatttcatgaaaatgcactttcaaattgtttttggaaactacacctgactttaaaattatgataaaataatacaattagaggaaaaaggtgttatcgatgtatgcaattcgatgtataccttactgaaccacatataaacaaaaatagaggaatggtaaaatgaaggttgtagtagcaattgattcatttaaaggaagcatgacaagcatgcaggccgggatggcctgtaaagaaggcatattggcggcaataccgaaagcagatgtggtggtcagaccacttgcagatggtggagagggaactgtaactgctttggtagagggcatgaatggcacatatgaacatgttgatgtaacaggaccgatgggacaaaaggtgcacgcaacatatggagtacttgaggatgatacggctgttatggaaatggcagaagcgtcggggatcacacttgttgaaggtaaacctgatccatggaaagcgacctcattgggtgtgggagagatgatattggatgccgtgcacaagggctgtaggaatttcataatcggaataggcggaagcgcaaccactgagggcggcataggaatgctgtcggcgctcggctatgagttttatgatgaggatgacaatattcttccaccggtatttggctcgcttgcaagggtaaaaaagataaaggctgataaggttccttcagaattgaagcagtgtcatttcaaaatagcatgtgatgttactaatccactgtgcacagagcagggctgcgtatacatttttggaaagcaaaagggcgtacaggagcatgaaaaggcacggatggataaaatgatgagacagtatgcagactgtgttgaggagtatgcgggaaaaagcttcagcgagacaccgggagcaggcgctgcgggaggtcttggctttgcgtttctttttggacttgagaacgtggagcttaaatctggcatagatatagtgttaaacgcaatacagcttgacaaggaactgaaaaatgccgatatcgtagtgaccggagagggcaggcttgatggacagagcgccatgggaaaggtgcctgtaggagtggcaaaagcaggcagaaaaaacggctgtaaagtaatcgcactagcagggagtgtcactgacgatgcagtggcatgtaataaagaaggcatagatgcgtttttccctattataagaggggcaacaacgcttaatgaggctatggatatcaaaaatgctcaaaaaaatatgaaaaacactgcagaacaagttttcaggcttattgacatcagctcgcttatggaataatatatgttagtaaaattatgcgtggtgcaggggccggatgagatataaacgccccgtatatcatagaatatttaaataaaaaaggagaaaagcaatggctaaggagaaaaaattagtagaggccatcacttccatggaggaagatttcacacaatggtatacagacgttgtgaagaaagcagagttgatggattattcatctgtaaagggatgtatgatctttaagcccaatggttatgccatctgggagaatatacagaaaaatctcgatgcaatgtttaaagagacaggtgtagagaatgtatacatgccaatgttcattccggagagcctgcttcagaaggaaaaggatcacgtagagggctttgcacctgaggtcgcatgggtcacacagggcggacttgagacacttcaggagagacttgcagtaagacctacatcagagacacttttctgcgagcttttcagcaaaacagtacagtcacacagagaccttccaaaggtatataaccagtggtgctcagtagtgcgctgggagaagacaacacgtccattcctccgttcatcagagttcttatggcaggagggacatactgttcatgcaacagccgaggaggcagaggcacgtacagtacagatgttaaacatctatgcggatttctgtgagaaataccttgcaatccctatggtaaagggaagaaagacagacaaggagaagttcgccggagcagaggctacatatacaatagaggctctcatgcatgacggaaaagcactccagtcaggaacctcacacaactttggtgacggcttccctaaggccttcggcatccagtacacagacaaggacaataaattacagtactgtcatgagacatcatggggcgtttcaacacgtcttatcggggctatcatcatggttcacggagatgactcaggactcgtgcttccaccaaagattgcaccaacacaggttatggtcattccaatccagcagcagaaggacggcgtccttgacaaggcatacgacctcaaggacaagctctcaaaggatttccgcgtgaaaatcgatgcaaccgacaagacacctggctggaagtttgcagcacaggaggttcagggaatctcaacacgtatcgagattggaccaaaggatatcgagaaaaaccagtgcgttatcgtccgccgagacacaagagagaaaatcgttgtctcactcgatgaggtaaatgagaagctcgcagaggtacttgagacaatgcagaatgacatgctcgagaaggcaaaggcattccttgcaagccatataaacgatgcacacgattacaatgagttcaaggcaatcgcagagacaaagcctggctttatccgtgctatgtggtgtggagacgaggcctgtgagaacaaaatcaaagaggacacaacagttacaagccgttgtatgccatttggtgaccaggagcagatttccgacgtatgtgtatgctgtggaaagccggcgcacaaacttgtatactggggcaaggcatattaaattcgcgcctaaattcccgtatacgaatgttacaagcctcggcgtagtaccgctacgcctgcgtttgtaatcatccgtctacgaaaatttatttcgcgaattaattattacttttgtatattattatgataaacagctcgccggaggggcgcattgacgcagcatgtgtcacagttgtatgctgtggcaatgtgcccattcggcgagcgtcatttagaataaaaaaggagaactaaacgatgcgcatagatttaccgcagaatgtcaacttcataatagacacgctctacgagcatggctttgaggcatatgcggtaggtggatgcgtgcgtgacagtctccttggcaggacaccgcaggactgggatatcaccacatctgcaaagcctgcgcaggtcaaagcgatatttgaccatacgatagacacaggtatccagcatggcacagtcacggtcatgctggagcatgtgggctatgaggtcaccacctacaggatagacggagagtacgaggatgcacgccatccaaaggaggtcacatttacctccaatttgaagcttgatctggagagacgagacttcacaatcaatgctatggcgtataatcataggatggggattgtcgatgaatttgacggcataggagatttaaaagcacatgtgatcagatgtgtgggctgtgcgcacgacaggttcagtgaggatgcactcaggatgtttcgtgcggtgcgatttgcagcccagcttggctttgatatagagacacagactaaagcagccataaaagagcttgcccctgccttgtcaaaggtcagcgcagagcgaatccaggtggagcttgtgaagcttctgacatcagacaatccgcagatgatgagagatttgtatgagcttggactcacagcggtattcatgccggagtttgatgtgatgatgcagacacctcagcacaataagcaccatatgtacagtgtcggcgagcatacgcttcataccttggagcatgtgcgagcggacaaaatcctaaggcttaccatgctgcttcatgatgtggcaaagcctgtgtgcattacgacagacgaggaaggccagaatcatttcaagaagcatccggttgtgggagctgatatgacaagaaagatactcaggcgccttaagtttgataacaggactacagactgttgttttaagctcgtaaaagagcatgatgatcgtccggccatcacggagcgcaatgtaaggcgtgccatgagccgcataggaacagagctttttccgctgttatttgaggtgaaaagagccgatacactcggacagagcatgtataggcgcgcagaaaagctggaatacatcgcagaatatgagcgtgtatacaggaaaatcctcgcagaccaccagtgtgtatccaaaaaggaaatgaaaataaatggtagcgacctgattaaaatgggagtagagccgggaccgaagcttggcgatatactggacaggctttatgagctggtgcttgatgatccatcgatcaatgaagcacaaaaacttaaagagcttgcgaataaaataataacctctctcatatgattaaaaagcatctgaatagttatgatgcattaatcatatgaggggggatttttttgtataatcagccggaagtggctttggaaaaatatgagcttacagtaagcaggataataaagggcagaggagcatatatatgtgatacaggcatcgggcagaagctgctcgtgccgtacagagggcatgagcaaagggcatgcgccctgcgggatacgctggcatttatccagagaaacggtatggatgtggagcagatatcacagacaaaggagcagtgtatcatatcgctagacaactgtgaggacgcatacatattgaaggattacagagcaggcagagagtgcagcacggacagcatagatgatatgcgtggcggcagcagggcattagcgcagctgcacaatatattggaaaagtatcctctgccttcggatattgaggtagaaagcctgcatgaaaaagctcagcgaaaatgtgcgcagatagtaaagcttaaaaactacatactgcgtcgcagcaagacaaatgcttttgagcatctgttttatgaatgctatgagagattcttagagcaggggaagaaatcggcggaaatattgtgtgagctggaaaatagtaaaacgttggttccgacatactgtcacggagccttcaaccagcacaatgtcgtgtatacacagtacggaagatggctccctgtcaatttcgagaccatgcatccgggatatccggaaactgatcttgcggagtacatgcgcaagatgctcgaaaaaaatcactgggatacagcggttgcagatgcaattcttgacagctattgcagcgtaagaagtcttgatgatacctcaatgaggctgcttcaagcactgcttttgtttcctgaaaaattttgtaagctctgcaatcactatagcaactcgcgcaagtcatgggtatgcgaccgtgatgtggataagcttgcacagctcatacagctaagcggggagcgcgaggagtatctgcatgccatagtgtaaacagtaatgcatatatatagtgaatttaattgaaaagtaaatgactatacgatatattattattgtggaaagtctgttaagaaaagttcagacatacatcactgaaaacgacagtaaatcatctgacagctcgggatatagtctgataaataaagatatatcagattatctttcaacattaacctctttattaagttcaaagtaaggttttaagaatggtaaaagtacataaaagcctaggaaatagcgcattttccttgacaaaccccataaaaacaagtatatatattcttgtaggtaatttgggaatatagctcgaattatataaattatgaaaatccagaggaggaattttatcatgaacaaagcagatttagttgcagctatggcagagaaggccggagtatcaaagaaggacgcagaggcatctttaaaggcattcacagatgttgttgctgaggagttaaagaaaggcgagaagatccagttagttggattcggtactttcgaggtatctgagagagcagcaagaacaggaagaaatccacagactggcgctgagatgacaattgcagcatctaaggctcctaagttcaaggctggaaaggctttaaaagattctcttaactaataagtcagactatccggagtagaagaatgggtgaagcctttaaggctccgcccatttttgactatatccactgaaatcagggtaatagttatgaattgatttattataggtaagacacagaggtaacaatgagattagacaaatttttgaaggtatcacgtctgataaagagacgtacagtggcaaatgaggcatgtgacgcaggccgtgtcacagtaaacggcaggccggcaaaggcatctgtaaatgtcaaggtcggagacataatagagatagcatttggacaaaagacagtcaaggttaaggtgttaaatctccttgacacaacaaagaaggaagaagcaaaagatctttttgagtatatataggttatattttcatgaatcccggcatatatttacatatgtgattccacagatggcagccatatgtgaggctgtttttgggacatataaaaaatatgtgagggacaggaaatggaagaaatatcaggcacaaagagtcataagcttatcttgaataatcgcagaacaggcagctttacaggcattttggatgtgctctcctttgatgtgggagagatacttttggagacggagctaggcatgcttgacctaaagggcaaggatcttcacgtaaacaggctaaaccttgagaagggagaagccgatatagaaggtgagatagacatgattacgtattcgaaggtaccggaggtgaccggaaaaaaagataaaatgtttggcaggatattcagataagcacctaaggaggaataatgagtaaacgtcgtgcaaagagaaggggcggaactttaagtgtttctatcatagttatagcatttcttgtggttatggtagtccaggttgtgcagctaaagcagaaggaatctacatatgccgcacaaaaagcggagcttgaaaagcagtacactaaagaatcggagcgtgctgatgagatagaaagtatgcagcagtatatgcagagtgaccagtacatagaggatatagcaaagagcaagctggggcttgcgtatgacaatgaaataatcttcaaggaaaaagacaaataatttttgaagatatagttgcgctttttcgtcaaaaccttcatttttgaccacatataatcgttgaaaaaagatggaggcaaaaagatgaggagtgcaaatttaaaaaaggccgtgtgggggcttatggcatttgcatccacactggtgtgtgtgatggattgttatccgctgatacctgcagtgtatggagtttattgtctgagcagtgggcatacgattattttttacataggattaattattggaatgggatactttatatcgataccgtcgatatgtaagtatctctttattattgcggtgatttactttggggaaaggctatttgtgagaaaaagcagtaaaaacggatgtctgacaacagccgttgtagcagcttgtgccacggcggtgatgaatctgtcggtaacatttctgggaaggccggatacggatgagatagtgttgtcggtggcagagagccttgttgtgttttcgatggcctttgtgctttgcagagcatgcgaatatttaagggctcttgagcacaatgaaaacccggtcatagcaggacttctgcccgacagggaggaggcatttgccacagcagtttcaggactttcaggcattatttcgactgcaaatgtcatggctgtaaaatgtacggcagataaaatccctgatgagagtgagaaaatacagcttgaggtgacagggagactttgtgcatgctgtgagggctgcagtgtgtgctggacaagcggggcttcgatttccgacagtataaaaatgcttgctgatgcagtgcgcaaacgtatgaaaacagaggaaattgtgcaaaacagatatgtggatggctgcccgcactatacgcgcatggtggaagccgccacagaggcatttgcccgtattgagctaaatgaagcctggtacaggcgtctcacggaaaacagacgcgttatagccgcacagcttgacgctatggcagagctcatggagagctggtgcagggctgaaaaatgtattgataaaaaaagaaggctgcgcctttcaagagtttatgtatatacaaaagaggctggtatacaggtggaaaatgcccatatttatgagaacgcaaggcagcaggtatgtataaaggcagatgtctgcaccaagatagaaggtgggattgaaatttcaaaatatgtgcaggcggtttcacgcgccatgggagtgaaactcaggcaggcacatgggacagtttcaataatatccgatgagaggacatctattgtgctttacgaggagaatcagttatatgcactttcgggggtggcgaccaaaaagaagaccggctctcaggcaaatggcgacagctgcagcatgtttcagctggatgatggcatgtatcatgtatgtgtatccgatggcatgggctcgggcaagcaggcgcaggccgagagcacactggtggtggatttgcttgaaaagcttttggaggccggttttagcagggaaagtgccctaaagctgatgaactctgccatggtcatatcggcgggcgaggagtcctattccacggttgattttgccacaatagacatgtacacaggtgagcttgagctgaccaaaacaggcgctgcaccgtcatttatcaaatcagggaaacaagtaagtgttatagaaaatgaatcactcccggcgggagtcgatgtctggcaggagagcaaacaatcaaaaaatatacttcaaagtggcgatttccttgtcatggtgacggatggtgtgctagaatatctgcatgtaaaggacagacaggggaagcttatggatatcatagcaggcgtcaaaagtgacaatgcaggcgtgatggcgcaggaaattctggacagggtgctgcttgacacaggcggatacgccatggatgatatgactgtagttgcaataggaatctgggaaaaataatgattagacggacgaaagattatattctggaaaacaagatgataaacaatcacagcacggtgcttgttgcgctgtcgggcggtgcggattcggtctgccttctgctgttgttaaatgagataaaaagacagtgcgcagatgagcttgattttgcgttggaggcagtgcatgtggagcatggtatcagaggagccgagagcagggaggatgcgaggtttgcgtcagatctctgcgagaggcttaacataccgtgccatgtgcatttcgtggatgtaccgcaatatgcaaaaagtcatggactcggactggaggaggccgccaggatattgcgctatgaagcgtttgaagaggaggcaggcagatatccctgtgaaccggccaatgcatcagacccaaatcaggataacaggaggcaggtagtcgttgcagttgcgcaccatatggaggacaacgcagagacagttctttttcagatgcttcgcggaagcggagcgaagggactatccggcatgcatccggtttctgtgaagaacggtgtcacctatatcaggccgcttttatcagcaacacgcgcacagatagaggaatatctaaaggaaaacggacaggcttttgtcaccgatgccacaaacactgacacagcctactccagaaataagctgcgccatgatgtgtttccactgcttttgcagattaatgacagggcgattgagcatatcaatgagagcgcaggacagcttgcggtgatgaatgatttttacgagcagcagctaaaagaggcgtgtgacagcatgatttcaaaaaaagaaggcagggtgatacttgaaatcagccgttttgagagtctgcatccggcattaaaaagcggagtggcgcgcgagtgcatacatctggcgtcagggcggctcaaggacatcacgagcacgcatatcggtgcacttgtgaagcttgcagggcagcagtcgggcagaaaaatcaatctgccgtatggaattattgcggaaaaatcatttggtgaggtgatactctgcgccggaaggtgtgacgatgaaaaagcagaaattcacattacgcaaaaagagcttgaggcactgagtgccacaggagagcaaaaaaatataaagctttcggcagatggctcatatgtcacactttgtatacaagattttaatggtaaaatggacgaaattcccaaaaaaccatatacgaaatggtttgattatgataagatgaagaaaggctttgaaataagaacaagaaaagccggtgactatataattgtggatgacgagggccatcataagaagctgaaacaggtatttacaggtgataaaattcctgcacagcagagagcggggctgtggctcatagcccatgaatcactggtgcatgccattatcggatatagatccggctgtggcgcacttgtcacaccacagacaggaaaagtacttaagatcacattttacggaggaaaacaaaatggatttttcaaaaaaatatgatatttcggtttatctgacagaggagcagctcaataagcgtattgcagagattggagcgcaaatcacagaaaaatacaggggacagtcagtatatctcatttgcatacttaagggctcaatattctttaccactgagcttgcaaagagaattgatttgcctatgactatggatttcatgtcggtatccagctatggctcaggcacagagtcatcaggcgatgtcaagattaaaaaggaccttgagcattctatcgagggagagaatgtcatcatcatagaagacattattgattcgggaaatactcttagcaggctttcaaagctccttgccaaaagaaacccgaagagtctcacaatctgtacacttttggacaagcctgagcgccgtgtggttgatgatgtaaatgtagactacgtgggctttgtgattcctgataagtttgtggtaggctatggccttgactatgatcagagattcagaaatctgccttacatcggcttcgtcgagggcgaaataaaataaaaaggagaagtaaattgaataaacaaaaaagcggtatgcgcggaataggcgtatacattatcattgtatttgcagtaatctgcatctggtactggctgagcgccggggctacatccaactcttacacacagagtcagttcgagaaggatcttgacaagaatcaggtgaagagcgtaaaggtagtgcaaaacagggagataccgacaggaagtctggaggtgaagttcaaggatggcacatcaaaggtactttatgtatcagatgtaaacaatatcgaaaagaccatgacaaaagcagggtacaccgactatacagttgcggatgttccggctgagagctggattatgacactgcttccgtatgttttggtattcggagccatgttcatattctttgcagtgatgaacaacaacgcagcagcacagggcggcggtggcaagatgatgaacttcggcaagaaccgtgcgaagctcaccacacaggaggagaaccatatcaagttttccgatgtagcaggcttaaaggaggaaaaggaggagattgcagagatagttgatttccttcgtgatcctggaaaatacaccagacttggagcaagaatcccaaagggtgtccttcttgtaggacctccgggaacaggtaagactctccttgccaaggcagtagccggagaggcaggggtaccgtttttcaccatttcaggatctgatttcgtggagatgttcgtcggagtcggagcctcacgagtgagagatttgtttgaggatgccaagaaaaatgcgccttgtatcgtatttatcgatgagattgatgcagtagccagacgccgtggcacaggaatgggcggcggacacgacgagcgtgagcagacattgaaccagatgcttgtcgagatggatggctttggtgtcaatgagggcattatcgtcatggcagccacaaaccgtgtggatatacttgaccctgctatcatgcgtccgggacgtttcgacagaaaggttgtagtaggcagaccggatgtgggcggcagagaagaaattttaggtgtccatgccaagaaaaaacctcttgcagaggatgtagacttaaagcagattgcacagactacagcaggcttcacaggtgcagaccttgagaatctgatgaatgaggcagcaatccgtgcagcgggtgaaaacagagaatatatcacacaggatgatatcagaaaatccttcgtcaaggttggtatcggagctgagaagaagagccgtatcatctctgacaaggaaaagcgcatcacagcctaccacgaggcaggacatgcaatccttttccatctgcttccggatgtgggacctgtatacacagtttcaatcatccctacaggagcaggcgcagcaggctacaccatgcctctgcctgagaaggatgagatgttcaacacaaagggacgtatgcttcaggaaatcgtagtagacttaggtggtcgtgtcgcagaggaacttgtgtttgacgatatcactacaggtgcatcacaggacatcaagcaggctacaaagcttgcgcgcgagatggttaccaaatacggtatgtcagacaatatcggccttatctgctatgccgatgatgaggaggaggtcttcatcggacgagacctcgcccatgcaaagaactacagcgagggcatagcatcggcaatcgatgtcgaggtaaagcgcatcatcgatgagtcatacgacaaggcaaagagcatgatagcagagtaccgcgatgtgcttgacagatgtgcagcacttcttcttgagaaggagaaaatcacaagagatgagtttgaagcactgtttgacgaggacagcaaaacagcagttggacataatatttaaaaaacaactatgtttttgtacacaatcaccatatcaaaaatattaaatacgactaaagtgctatacaaattgcataaaaacaaaccacgatttttatgcaatttgtgaacacttatcgttataaccgtgatattataataaccgtaaaaaccccccaatacattatatagtttttgctataccccatagtaaaaataccttctcctaaaaggcagccgatcgtaggctgtcttttttaatttaaaaaaatagtaactattcagaacaattgagaacaagaaaagctgatgcgtcatgcttgcatgtaagcagcaggttttcttgttctcaagggggctcgaatagagccaccccccacacatatgagcaaaattagctgcgtagcggcggtaaagcacgagtatcgtgcggttttgcgaatgtgcgtgggggttctgaatagttaaaaaatatgcttgcataatcacatctgttgtgataaactatgcaagtatcgtaattaaatacatgggcagattcccgagtggccaaaggggacagactgtaaatctgctgcaacttgcttcgatggttcgaatccatctctgcccattaaaaaacctcaagtcgtatgacttgaggtttttgtgttattctgaaattatcatttaatcggcctgcgccccggtggcggtaagtacagactcccatgccatcgtatcaggccagtcctttgtatcaaagccatcacggatacatctgctgtagtagtccagcttgtttcgtatcggcgaatcatctgtgaatcttgcatcatcataaatgccgttaatataatcgtctatcgcggttccgaatatttcagagcggtcctctgttgcaaaggtcatgccatatgaatcaatgaaatacccggatatgtggctcgatggatcatccggattgtagtttgcgtagctatcatcataagagaagctgtcagggttaaagctgttccatttctcctcagaaaactcgctcttgccatcgtaggtgtgtatgaatgtaagcctctggtcaatcagatgggaaatctcatggcctacagtgtagctgaaatcccagctgtagttgcagtttagaaccatcacattgtggttgtttattatatttacgaatccgcttggctcatttatcatatctgagtggcctgatgaaatatcaccgcacagatagattcgcatgcctcttatatcgccataacacagctgtgtgaaaaagtcatcagggaaacagccaagtatttcctcaagcgcatccagagcgactgacagcttatccttgttcttgaattgatggatatcgtagtaatcaattctctttggtacttcaggcccgaaatatatggaaaagccgtatttctgttcaagcgctgtgatacgtgcatttatgtcggataaatcaccccagtcatatgaagcggtgtcaggtatcagagtgacctcatcgccgtatgtattgtagtcggaatccttcccggcttcctccatagcctcctgattttcatcggtactgtcagaggggtctatgacagaatatggggatacataagagccgtcatcgcgcaaggcctgtagcagtgcatcacagtcattgtatgacgtgatttcggctttgctgtcattcttgcccttgtcgagtgaccagatgagaatttccgggttgcactgcgctgtgtacaaaagcatcatcacacagtttgcatcaggcagatataccgagttggcagaacagtaggtcttggtatcggctgccgcagagtcggatgggctgtcggacattttgcctgtgcttcgtgttgccaggttgtatgaaaaggatgaactgacaccggtggcgggtgaatatttatagtaactgatgatgttgtccgaggataaatcctgacatcgtattagtatgtcaccatcctctgccaaagtcacatccaccacatccggcagtgaaaaaaagctgttttctccatcggatgaatgatagttccaaatattgttggcagtatctgcctcgattacaaagccctttgagtcgacacatgacatggaaaaactttgtccttcgtaggttgaaagcactgtgttatcgtcaatccttatatctgagactgcatatttgtaggtatcgggtgtgacacctgacacgagagcgtattttccgtcagcggaggtggcaatctgtgagacatcataataattgccgggattcggcacatcgccatcatcagaatctgatgtatcacaattgccatcatagtcctcaggattatatttgcaggtttttatctcctttaaatccttatcatagattgttgccctgccggcatcggaattgatgagccagagtcggtcaccttttatcatgtagtcatcacagttggttttgtcgtgagtgagacttgccgtgatttcattggaccagggattatatacatcaaatgaatactgaacagattgatcatcggtctctaggatggaattattgtagctgccctgtcctaccataaggatgttatcaccaaactgtcttgtatcattgtacggccgcccctcaaaggcgacattgtgcaggatagacaggttgctgcttcctttaacacttgtggtatcctcccaaaacgcaggtgatttgtgcagaatagcctgcttttgtgcgggactcttaaatagataagagacatccgaaaaagaacaggctgtcatggagattgcactgaaaaataccagcgaatatgtaattaaagtagttacatgtttgcgtttgaacaattttgcctcctttggaaggtggtgtatatgcaggctattcctcagcagcatgtgcggtggaaactcgtgcagtagattctctttcaatcagcctcggacgtagctgtgtgcggctgattggaatatggtgaatgagcgaattcaatataatatatgcacagcggcccagatcattacactcctgtctgacagtggtaagaggaggggtaagggctgcggcaaacttgacatcgtcaaagccgaccacacttatatcatttggcacattgaagccgtgcagctggcactcggagataacaccctttgctatagcgtcgcttccgcagaggatagcggtggcacctgctgcaataaaatttgaaacgtaatattgtgcggtttcaggaatatagtagccgtgtcccatgagctccgggtagatttcaagacctgcatcgcgcatagagttttcaaaagcttcctgacgctgatccgaaaccaaggaaaaaagagaaccattgataaaggcaatctttttatggcccagattgtgcagatgctttacagccatgtcaatgccctcgtagctgtcggtgcctacataggctacattgggattgttttctatatagttatcaaacaaaactgtaggcattgtagtatttttgagctgctgcatccattcatcgtgaagagcaaaacctaccagaaatgcgccacaatagccattctttaatatatatgtatcatatttttcttcggcttgaagctgaggtgtggcagggatgatgtccacgtcccatttgtgcttaaaagcattctgtttgaagccaagcactacatcatatccgaactcatcgatagactcgtagttcatattttcaataaacagagccagcttgcggttttctacctttctggagcgctttgtgctgtagcccatttcgacagcagtgtctaaaactgtctgacgaagctcttcacttatatcgctggcaccatttaatccttttgaaacagtgctgattgacacacccagccgggtggcaatatccttaatagtagccatagtatttgtcctttcttatgtgataattaaattatacatttaccatcagaaataggcaatattttctgtaataaatttttcgaaaaaaatctttgaaatcgtggtaataactaccaaaaaatgaatataaattacgtgaaaaatggcaaaaatgagtttgaaaccactaaattaattgacaaatacgacaataagaaataaaataatctcagatacgaaaaaaaaagaaaatttcaggaaagaggaatggtaatttggagaccagagaaaatctcagaggctccggaatacttctttcaatctcgagtctgccgtcaccatatggtataggtactcttgggagagaggcttacaattttgttgatctccttggtgatttgaaacagaagtactggcaggttcttccggttggtcccaccatatttggcgatagtccatatcagccatcatcaggctgtgcgggcaatatctatttcatagatttagataagctggtagatgaggggttgttagagaaggaagagatcctggagtataactggggcacagacgaatcagaaattgattatgcagcattgcatcagaacagatgcaagattttacaaaaagcgtttgaaagatttgatacaaatgcacaagagtttcatgattttgtaaaaaaacagtcggagtggcttgaacaatatgcactatttatgacactgaaaactgacaatttatacaaaaattggagcgagtggccaagcgagtatagaaatacgcaaacggttgcgcttgaaaagtaccaaaaaaagaattataatacaattactttttggaagttctgtcaatataaattcttcgagcaatgggaggatttaaaaaattatgctaactcaaaaggcatctacataataggcgatatctcattctatgtaggatatgacagcgtagatgtgtgggcagagagacaactctttatgatgagcgcaaacgatacaccagagtatgttgcagctgccggtcctgataaatattcagagagcggacaggtgtggggcaatccaatgtatgactggaatgccatgaaggaggacaacttctcatggtggggaaagcgaatgcgtgtatgcagagagctttttgatattgtcaggattgatcatttcgcaggaattgtgaaagcatatgcggtaccgtacggacaggataagagcctatccgggaaatggttcaagggaccgggacgcaggcttgtcaatgcaattaacgaagagcttgaaggggttaatgtagtggctgatgattatacatcagcaagccttttaccgggagtgaaaaaactccttgcaaaatctggctggatgggaactaaggtcatgatgtttgcttttgatggtgatccgacaaacgaatatctgccacacaattataccgattcacatgtagttgcatatattggcacacatgacaatgagacgatagttggttcattcagtgacaagacagattatgagcttgcttatctgtatgagtatctgaatattgaaaataaatcacaggttccaaatgctcttatcagggagctgtatcacagcaccgcagagctggcgatagtccagatgcaggatatattagagcttggaaatgaggcaaggatgaattatccttcgacagtcggacataactggagatggcgcatgacaagtaagccacacagattggacaacgaaaagatagcctggattagaaacattgcggtggtttaccgcagataattaatttgatataagttgcacggcaatttatatatatacttttttacattttatattcaaaaaggagaggaagatatgaagaagaaagtattagcatctttactttgcgcttctatggtagcaacaatgtttgctggatgcggaagcggcaacggaggaaatggaacagagaaagccgacaagaaggacggcggtaaggagaccattacagtaatgggacctgcagaggatttagacgatgcacagggcgcttggcttaagacagagtgtgaggcattcgctaaggcaaatcctgatttcaacatcgagttcaagtatgttacatcatctgagagtgatgcaaaggacgttgttacaaaggatcctaaggcagcagctgatgtttacatgtttgcaaacgatcagcttgagccattaattaaggctaatgctattgctaagttaggcggagatacagcagagtatgttaagtcatctaactcagaggctatggctgcaacagttacatatgatggagacatctacgcagttccttatacatcaaacacatggttcatgtactatgacaagagagtcttctctgaggatgatgtaaagagccttgatacaatgcttacaaagggtaaggtttcattcccatttgataatggctggtatctcaatgcattctatgcagcaaacggatgtacaatctttggagatggaacagacaaggctgccggatatgacttcagtggagataagggtacagcagttacaaactacatcgtagatttatttgcaaatccaaactttgtaatggataacaatgagggatcacttggtcttgctggacttaaagatggttctatcaacgcttacttcaatggtaactggaactatgtcaaagttaaagaggcacttggtgaggagaacgttggtgttgcagctcttcctacaatcaatattggtggaaaagactgccagttaaaggcattcttaggatctaaggctatcggtgttaaccctaactgcaagaaccaggaagtagcagttaagcttgcagcattccttggcagcgaggacgcacagcttgctcacttcaagttaagaggacaggctcctgtaaacaaagatcttgcaacaaacgaggaagttgcagcagatccagtagcagcagctatggctaaggtttcatctgattgttcagtagcacagcctatcattgatatgtcaggttactgggatgcagctacaccattcggtgatgctttccagaacggtgcagaaggtcagattacaaaggacaatgcagctcagaagacagaggacttcaatactcagcttaatgattctcttaaataattaagtagatcagattatgattccaaggttccgggtagccggaatcttggaataaattagtttaaaggattggcatatataatgcatgccaggaggaaaagtatgttaggagcaaacaaaaagaaaaaagtttcggaatttgctactccgtatactgttggcaatgccctcacaaaaggcggagctacagttaagctatcggcactcgtaatgggacttgccaatatggctcataagcagattataaagggtctgatttttcttgctatagagattgcatatatagcatatatggttagcgctggtgcttattacatttccatgctgccttcacttggctggagaaagcaggaagaggtatttaatgagcagaagcagatttatgaatatgttgcgggcgaccagtcagtattattactgttatatggcgtcataacaattgccatcacagtattatttatttacatgtggtgcgagaatttaaagagcggatataaggcagaatgcctttcaaaagctggaaaagaaatcaattcttttggcaaagatgtcaaggatttatttgataaaaacctacataagacacttatgtttctcccacttatgggaatatttgtttttaccgttttaccattgctgttcatgattccaatggcctttacaaattattcggtaaagggtgatcatctggtattgttcgactggacaggcttcgcttcattcggacaggtgcttggacttggtggtaagcttggtaagatattctggagagtacttggatggacaatctgctgggctgtatttgcaaccttcctttgtaacttccttggactcattcttgctatcgttatcaatcgtaaagagacacattgcaaggctttctggcgtacatgctttgttatctcaattgcggtaccgcagttcgtatcactccttgtaatgagacagatgttccagccacagggtgctgttaataacctgcttttggagtggggctggattgataacccgcttccattctggaccaacactatgtgggcgagagtttctgttattctcatcaactgctgggtaggtattccgtataccatgcttcaggttacaggtgtattacagaatgtgccttcagagctttatgaggctgcaaagattgatggtgcaaacgcagcacagatcttctttaagatcacactcccatatatcatgtttatcatgggaccatatatcatcacacagtttaccggaaatatcaacaacttcaacgttatctacctgttatcagcaggaaagcctacacctgtcggagacagtgcaggaaagacggaccttctggttacatggttgtacaagctgactattgataatcaggagtacaatatcggtgccgttatcggtatcctcacattcattgtactttctatcgtagcgcttgttacatacagaaatacaaaatcatacaaggatgaggagggattcatgtaatgagtagtgtagcaaaagcaaaaaaacctatgtctgccggacgtgctaagaaagtagcaaagaattcccttgttcatatcattcttggaatacttgctgtagtatggctgttcccaattttctggattattatgacaagctttagagctgagagtggtgcttatacaaagtacttcttcccacatggccttacatttagcaactatacaaggctgttcacagagactacactgttgaacttcccgagagcattttttaatacactgtttatttcagtgatctcatgtatcatttcaacagtatttgtactttctgttgcgtatagtatgtcacgactgagatttaagatgcgtaagcctttcatgaatctggctatgattcttggattgttcccagccttcatgtcaatggttgcagtatactttatcttaaaggctatcggacttacagatggcagtatgcttcgaatttcattgattctgatttactcagcaggagcaggaacaggcttctatatcgcaaagggattctttgatactgtgcctaagtctcttactgaggcggctatccttgacggatgtacacagttccaggtattttacaaggttatcctgccactcagtaagccaatcgtagtatatacagtacttacagcattccttgctccatggcttgatttcgtatttgtaagggttatcgttggtccaaacgacaagtattggacagtatctcttctcctttacaacatgcttgagaaagagtttataaacggatggttcacaagatgggctgctgctgcagttgttgtatcaatacctatctcaatacttttcgtcatcatgcagagattctacgtggatggacttacaggagctgtcaaaggctaatttggttttatttgggccgctgcacttttgtgcggcggcttttggtttatattgggttgtggcaaacttagcattttcaggttgtggggtgccggcatggcacacagtatattcctcagaaaaatatgaagtcagccacgggctttcttcgctgcttggatttggagatatgaggtgtgtggcttgtttgtgggggcatggcaccccgtggcagttcatattttttttcggaacacactgtgtaccctccggccggagggtaccgtgtgctaagtttgttgctaccttgtgaaagatgtgagaatgtgtgtagtgattttgtagatacaaatttgctcagaatttagttaagaaaaggagtgcgtatgattaataataaaataggcggccgcaatatggtcggcagggctgtgaatagattggcgggcaggttgactgctgtggcattgacggcagctatggcggtgtcgatgcttgcgggatgtgctgcgggtggaaagaataccgagacggcagcaaagaaggagtacaagccttctgctatggagcagatgaatgcgaaaaatgatcctaatgtgattcaggacaattacaggacctgctatgaggttttcgtatacagcttttttgacagtgacggtgacggcattggggatttaaagggacttacagagaagcttgactatatcgagggacttggctgcaatgaaatctggatgatgcctattatgccttctccttcataccacaagtatgatattacggattatatgaatattgacaagcagtatggtactttggatgattttgatgcgcttattacggagtgtcacaagcgaaacatcaatgtgattattgactttgtaataaatcacacatctaacgagcatccgtggtttaaggcggctgctgattatatcaagtcgcttcctgatggggcagagccggattcttcggaatgtccttatgttgattactataattttagcaaaaccaatgccggaggctacaaccagctgccgggcacgaattggtattacgagtcacagtttgtagacagcatgcctgaccttaacctgcagagcgaagctgtaagaggggagattgacaagattacatccttctggcttgaccgcggcgtggatggcttcagactggatgctgtgctttattacaataataataaccagactgagactatagatgacctcacctggcttgtaaacaatgtgaagagcaaaaaggccgatgcttatatggttggtgagggctggactacatacagagagtatgcgaagtactataagagtggaattgacagtatgttcaactttgatttttcacagcaggatggatatattggaaaggtgttaaacggtacagcaaatcatggtgccagcacatacggcaatgctttggttgatgtggaaaatgagataaagaagtatacagactcatacattgatgcacctttttatacaaatcatgatatgggacgcagcgcaggatactacaacggagataatgccgaggagaaaaccaagatggcgcaggccatgaatctccttatgcccggaaatgcttttctgtattatggagaggaaatcggcatgagaggcacagccaatgatgagacgaagcgtcttgccatgagatggagcggggattcaaaagctaagggaatgtgtgtgggacctcagaatgcagaagaaaccgagcagacatatgataccctggataaacagatggaggatccatactctatttacaactttgtgaagcagacaatatcaataagaaatgctttcccggagatagcacgaggtacaaatacctttgaaaaggatctgtcaaatgataatgtatgtatatttacaagagagtacaatggtgagaaagcagtgcttatatttaatccatcaaaggatgaagcaagtgtggatgtgtcatcgcttggagtaaatgatgctgttgcaatgcttcagactacaaagaaagccccgtcgtataaggatggagcggcaaagctgccggcgtattcggtgcttgttttgaagtaaaaaatatttgatgggaataaaaatttaatagtttaaaggaatttgaagaagaaatatgaaaaaccgcccgactgggcggtttttcagctataccatttcatgaagcatatctacaatcacttctctgcaatgagctccgagatgcttttgttcctctttactgagtgctgccggatcaataggagtgccgtattggataaccacatgcctctttttgacccatggaaggtgatcctcgaatatttcatttgttcccatgattgccattggcactatcttgcatttgctctttgtggcaatcttgaaagtaccttctttgaaagactgtacctctgtcaggtcatctttgtttttgcagcgtgtgccctcaggaaatacacatatgctgatgccggatttgacctgatctatggctgcaagcacgacctttagtccctgcttgatgtcatcgcggtccaaaaacaggcagtgtaggcgcttcatccagagacccaacaccggtatttttgcgatactctgctttgagatgtagccggtcagatgtggacatctggagtaggtgattatgatgtcaaagaaactacggtgatttcctatatatagtacagcctcgtcctttggcacattttcctcccctataaattcaatgtctgctccgcttaggaatatgatgacacggaaagcccactgtaccaggcgaagctgtgccatatcggcccatgccggggcaaatttgtgtattatccacatggctccgagcaccggaagaccgagcagcagatagaaaaatacgaatattacgattaaaactgaacgcatatttgacctctctttttcatactctatataaattgtagttcaatatttgatattatatcatatcataagcgatatgataagaaagagaggaaaaaatgtcagaaaaattgagaaaaattctggtggtggctgcaggtgtgcttgttatattggaaacgacagtgatttcgggctgtcgcgcaaatatttcaggcacggagagtgacaggatggttgagtacacggtgatttgcggggatgaaatcccggaggagtttaaaaagcagataaatgaaaacaaggcaaaggcgatgaagctgacgtacaaggatgatgaatatttatacatagcggaaggctttggcacaaaggagacaggtggctacagtattacggttaaccagttttatgttaaggataaggcaatgtattttgatacgcgtctgatagccccggataagggcgagaaggtcagcaatcaggcgagttatccgtatatagtaataaagacggaattgagtgaaatgcctgttgtgtttgagtaaaaatttcgtaaattgtattaaaagttgcgaaaaaactgacaatcagtactaatgccctattgctatcactgcgatactttgctatagtaaagttactagatattgtggtgacatatttatatattcaaatatattgattgatataattgttgattaatttgacctgttttatatttatacagagattgatttcatatatatgacaacgtcgttacaatactggttaccatgaggactatagttatgtgccagtgggcatacccacaataaggaggcttaaaatggaacagacagaaatcagaaaagtcagagcatcgatccaccagcagtgtggcaacagggtaaaaatccagcaggatcttggccgcaacaaggttgacatccaggagggtgttattcagcaggcatacccaagtgtgtttacggttctgatagatgatgagtttgagcagaatccgccacagctcttatctttctcctacactgatgtgattacaaaagatataaggatgcagctttgctagtatcatgaagtaaagatgttacatctttattataatgatcatgaatttaaatatttgcatctgcataaagttactccatcttgaatatgtattttatatacatatttgaagtggggtattttttatggacttaattacacaaaaaatcagacaatgcatagaaaaggtaaaggatatgtcgcaggttggcttcgacagggattatgtcataaaggacaataagcctgatgtttccaaagtggtttgccagaacgggcaggtaaagcttgacgagataaaagcgtcaggcgagaatatctggctgagtggaagcattgaatttgaagtgctgtatacgagagaggaagtttttgaaggcgatgagccggaggaaaatatcggcggaaacagagtggagcatataaaggatgcaataccgtttcaggagaagcttgtgcttcaaggagtctgcgagaaagatacggttcgtgtgtataccgggcttgatgagcttacggttggggttatcaattcgcgaaagctctcggtcagaggcattataagtgtggagctttatggagagagggaagaaaatcttgaggttgcacaaaggattgatgacaaggacgtggagcagcttatggggcagatgaaggtgcttaagcttgacagtgttgtaagggatattgtcagaattaaaaatgtcgtcaccttgccaaagaccaagccgaatatatgcaagctcatatcaagtcttgttgatatgagaaatctggagtatacatacgagcgtgaccatatcacactgacaggcgagtgtcatgcgtgtatagtgtatctgagtgaagaacaggaaatttgctgctttgaggtgcaggagggtttttcaaatgaaatacgttgcgagggtgataatgccggaaatattgcctggcttcgcacacagcctgccatgcatcaggttgaggcggaaaatgattacgacggagagctcaggcagctttcgattgaggcagcacttgcggtggatggaaaggtctggagtgaggaaacagtagaggtgctcaatgacatgtacagcgtatcatgtccggtaaaacctgtgtttgaaaatatgaaggtatgcagccttcttatgaaaaatgacacaaaatgccgtattttggagcagttgtacagagaaaacagcaaaaagagaattttaagaatatgcggtacaaagacgcaggccgctattgcacagataaaaaatgcagatacaggaattattgtgtcaggtgtattgcaggtgaactgtgtgaatattgtggaggatgatggctgtccgatagagatgcatacagactctgtgccgtttgaacagtttgttgagatacccggcatggatgccaacacctgctgcgaggtaaatgtgcaggtagaccaggtgcaggtcaatctactcgacaacagcgaatatgaaattaagggtgttgtcagcataaacgctattgccctacagcaggatgaagtgtcagtcataacatcggtggagcaggaaaaaacatcgtctgatactgaagaggaagcagctctggttggctatatagtgcagaaggatgataaaatgtgggacattgcaaaaagataccgcaccactgttgaaaacataatggaaataaatgctctgacatcagatagcatcaaacctgatgatagacttataatagcgcgtatgtgaatcataaattaggggcaagataccttttgactttttaatcatatcattatataaaatgtggaaaattctgtaaatttacaaaaagatgtggaaaaaagattcattttgtgcgataatatatccgaatgtatattgaacataaattgtggaaggaaaggtcaatctgaccgtcgtattacaggaggaataaaatgaatcagaaatggacacgtgctatatgtactgtgttaacatcggcactcgtttttacaggaccggcagtagagggcattacatttagcggatacataaacagtggacttgagaaggtatatgccaagacaaagaagcagaaggatgcagagaagaagaagtcacaggctgagcaggatctcaaggataagaagaatgagattaatggtttaaaggatcagcagcagattactgctgatgatataaagaataaatccgcaaagcttgatgagattcttgcagcacaaaagaagcttcagacagatatcacaagcaaacaggcagagatagagcagaatcagaaggatcttgcagctgctcaggaaaagcagcaggagcagtatgacgccatgaagaagcgtatacagttcatgtatgaaaacagcgctgaggacaatatctggacagcaattattgagtcaaatggtatcacagatatgctcaatcgtatagagtacgtgtcagatgtatatgattcggatcgtgctcttatggattcttatcaggcagcagttgagcaggtgaaggaaattggtactaagcttgacaaagacatgaatgagctcacagccatgcaggatgattatgagaagcagcaggcagatgtcgaggcggctatagtagctcttgaaaaccagaaggagcagtatgcaagccagatagctcaggcacagcagcaggcagataattatcagaatatcattacggcacagggcaaaatcattcaggagcaggaagcagcggccgcagctgcagcagcggcacaggcagccgctgccagagcgaacagctcgtcaagcagttcaagctatgatggtggtggagccggcaagggcggaagcattgccggtgactatgcagcaggcggtggaaagaacccgggtgcttcaacaggagtttcaggaagctctgtggtatcatacgctatgcagtttgtgggccatccatatgtatggggtggaaacagtcttacaaacggtgtagactgttcaggctttgtacatgaggtatatgcacattttggtatcagcacaccgagatattcacaggcatttaagtctgtgggacaggccgtatccttcgataatatacagccgggagacgtagtggtatatccgggacatgtagctatatatgcaggtggtggtgttatagtggaggcacagtccacaaaggcaggaatcacagcaaacagaagcgtacagtgtcatacaatacttgctatacgacgtcttgtataggatggttaggagccgataagtatatttattatacttaccggctctttttatttttaccacaaagtactgaattgttaccaataaagtaagggcgtaagatgcggacatgccacgacccaatgttagtaaccggcaacaaactcattgtaataaataatagcaatttccacccataaggtgtattatagagatagacggcaccaattcgcacaaaacgaactagcaagcctgtaaataaagtaagaaaagcaggaggaacaagccatgcagatggaacaattacaaaaagacatgattgcagcaatgaaagcaagagacaaggtaagaaaggatgctatatcctcacttgtatcggcagccaaaaaggcggcaatagatgagggctgcagagacaatataccggaggagcttgtcaacaaggtcattcttaaggaaatgaagtctgtgaaggagcagattgacacatgccctgcaacaagaacagatctgcttgatgagtacaataccagatatgcaatctttgaggagtacgctcctgcaatgatgtcggcagaagaggtagaaaaggagctcacagagcagttttcggatgtaatcgcaacaggaaacaaagggcagataatgaaggcagtcatgccgcatttcaagggcaaggctgacggaaaggtcataaatcaggtggttgcaaagctttgcgcaaaataagaaaacacatcataacaattatacttgcagtgctggctgtcatggccggcgtgtaggcatatatatgcagggcttgacaatgccgatataacggattatgatttctcgggaggcagatataagaagctgctggagaaaaataactataaaataaaagaaaaagtgtggaaaagagtcgatatgggaaacgttactcttgatcactagaaagaagattttatgtcaacaaaaattggaagaaatgacccttgctggtgtggcagcggaaagaaatataagacctgtcatgcggcatttgatatgaagcttgaaaagcttgctgaggcacatcataagataccgagccattcaatcatcaagacacctgaccagatagcgggaatcaaggagagcgccaagataaatgtcgcagtgctcgactacataggagagcatatccacgagggaatgaacacagcagagattgataaaatagtctatgatatgaccaccagcatgggcggcatccctgcaccgctcaactatgagggttatccttacagcgtatgtacatcagtaaatgagcaggtttgtcacggatttccttcaaaggacgtcatcttaaaggatggtgacatcataaatgtagactgttctacaattttaaacggatatttttcggattcatcaagaatgtactgtatcggaaatgtaagccctgagaagaaaaagctcgttgaagtcacaaaggagtgtgtggagcttggactcaaagaggtaaagccgtggggcttcctcggagatatgggacaggcggtgcacgaccatgcatttgcaaacggttacacagtagtgcgtgaaatcggtggacacggagtgggacttgaatttcacgaggatccgtgggtaggctacaacaccaagcgcggcaccgacatggtcatggcacccggcatgatatttaccatcgagccaatggtcaacatgggcaaggccgatatctacgtagatgacaagaacaactgggaagtatacaccgacgacggacttccatcagcccagtgggaaatcatggtacttgtcacagaggatggccatgaggtgctgagctggtaaaccggtaagtattacgagagtgctattattagcagacattatttcataggtgacaacattataaagggcgtgtgaaaaacgaagttttttcacacgcccttttgtataatcccatacagaatctagtaagtgaagcgttagcttcgggagagcatttttgcatccacggacatggcttataaaatcatcgttaattgcttcgcataaataacctaaaattaccggagagtatgcagtgtgttccgaagaaaaatataaactgccacggcgttccataaaatgtggatatgataattcatagcaaactatcaataaactatccgcaaatgatgccgtggctgattttatatttttctgaggaatatactgcatgctaggccggtcctcacagcctgaatatgcgaagccccataaacgaagccccataagcgatatcctatgatgcgtccctacagatttgtattcaccccatttatggtcgcattctcattctccctcataggaatgacgagacacttctccccattgatgacctgtgcatgaatctgtgaagccttctccggctttacatgaagcaccacatcataggtcttaatttgggcagtgtaattatcaatctcttcctgcttctcaagaagctgtgaagtgcgctcttcaatctgattatttttctcctggataacagaatccttctcttcaagctgtgcatttttttcattgagctctagagttaaatcgccgacctggctctcaagagcaagcttttccacgcggatttcattagctgcaagagcctttgaatcaatgacattggctgcgataggcggcttgtcaccgaaggcctcattgacggatttttcaatgcgtgaaatcttttcctcagagacatggcagtcactcagcaccttgttcatagcctcgctgtcgagaatgaacggatcatcgtcatcatcgtgagtctcagcgtagtcatcggccatctctgacagattctgctggatatcaagcagcttgtcatccgtgctctcgtcctcagcacctagcacgtttctgacgattgaatgaaaagccatcttctgctcagtagctgtgcgctccacaccgcagccgaggccgtttgtcataaactcagagtgaggctccttggtatttttcgtatagaaaagagtggagtgtatgtcagtgcttctatcgttgaaggcagggaataaaaagcctgtctcaggagcgccgactacccagtcccttatgcgggctccgatacgctgctccttttccagatagccaaggcccggctttgaaagtgtgacagggcagatggcgcagagcatgtatttgtacacctcctcggactcatccacgttgatgttgtcctttgtacgtgtcatgacatcgtagctgtcgagatacaaaagaatcaagtagtttccggcctcatcgtaggtgtcgatgaccagatcatagtatgtatcgagcagagtctcatcattaagctcgctgtcgcgaagcgccatgagaatctgctgtcggcctccgacctcttcctcctcaagcggaaactgcagattgagcaggttgtttccgagagtgccggaaagcaccttgtttgaaatctccagatatttgtagtattcatcctcctccagagtgagaaatttgccaccgaatttgcagaccttttcatggttgcagtccacgtagcagccgaccagacgactgaaggttgcctggtctttttttaatcttcgttttagttccaatacttcttttttgttcatattatcctcgcattattttcatgccattcaaaaattttcgtaatcacattatatgtatggaataaatatttgtcaattgagcggcgccttttatgtcccgctgtcaatcaagaaaaaagatgacagaccaaccacaaaatgctataatttaggaaatcaacggattatgatataaaggctgacacagagacatccacaggtgtctctgttcttggattgaggcataaatggagcagaaaatgacaaacaatcacattacaataggcattctcgcacatgtagatgcgggaaagacaaccctgtctgaggccatgctttacagcaccgggcagattcgctcactcgggagagtggaccatcaggacgcatatttggacaacgatgcgcaggagcgtgagcgtggaataaccattttttcaaagcaggcaaggcttgatatttcgcgtgacacaaatgcagcagatacagcagatacagcagatacagcacgtacagcagatgtagcacgcacggcagatacagctcgtacatggcatgtagtcatgcttgatacaccggggcatgtggatttttcggcagagatggagcgtacccttcaggtgctcgactatgcaatacttgtaatcagcgcaactgatggagtgcaggggcacacgcgcacactgtggagacttttaaaacactataacgtgccgacatttatttttgtaaacaagatggatatgcaggacacggatgcggagaaagtgcaggcagagctaaggagcgagctgagtgatggctgcgtggatttttcttcacaggatttatttgaggagcttgccatgtgcagcgagcctcttttagatgaatttatggaatcgggagagcttgcggatgcacatattgcgcaggcggtggctcaaagggaggtgttcccatgcttttacggctcggcacttaagctcgacagagtggatacgctgattcagggactttcgaggtttatgtgtgaaagaaattaccctgacgatttttctgcccgcgtatacaagataggcagggatgacagaggcagcaggctgacatttttaaaggttaccggaggctgtcttagagtcagggacaaaatagagtacaaagcgcatggcggtgacgaggcgaaaggccttctgattgagaaaatcgaccagataagaaagtattccggcgaaaaatatgatatagctgatgtggcagaggcgggggagatagttgctgtcacaggtcttagctcgacatttccggggcaggggctcgggtttgagcagcagtccaatatgccaatccttgaaccggtactaaactataggatgattctgccggatgatgtaaatccggctgcatttatggaaaagctaaagcagcttgaggaggaagacccacagctttacatagtgtgggtggaggagtttaaggaaatccatgtgcagctcatgggacaggtgcagatggaggtgcttgtgcgtctcataaaggacaggtttggtgttgttgtcacgtttggaccgggcagcattgtatataaggaaacgatagcgagggctgtcgagggagtaggacactttgagccgttgcgccactatgcagaggtgcatctgcttttgtcgccggcggagcgtggcagcggaatcacagtcacatccacctgcagtgaggatgtgctcgacaaaaactggcagcgcctcatagccacacacgttgaggaaaaggagcacaggggagtgctcacaggctcagcgcttactgatgtgaaggtcactattcttacaggaagagcacatgtaaagcacacggagggaggcgatttccgccaggctacatacagagcaatccgccaggggcttaaatccacagagagcgtgctgcttgagccgtactacagctttatcctacaggtgccgatggagtatgtcggccgcgcaatgacagatctggagcagagatttgcaagagccgagagcccgcagtttgccacaaccgctgcgagggagatggcaacaattacaggaaaggcaccggttgcgacaatgcaggattatgtgagtctggtgcatgcgtatacaaaggggctcgggcacctgacactggtgctgtggggttatgatgagtgtcacaatcctgcggaggtgattgcgcagatgcactatgacagcgaggaggatttccgcaatccgacaggctcggtattttgtgcgcacggctcaggctacgtggtgccgtgggatgaggtcccggagcatatgcacctgccgtatgtctatcacggagatgagtctgaggaggcacttgcagcgagtgcccgcacgcagaatgcattttcagcggaggatgcgcaggcgcttgccggaaaccgccgcaggacgagctttgagaaagctgtttcaggtatgtcatcggtggagcttgatgcgcagcttgcagatgtttatgccagggagtttggcatgggcaaaaacgatatcgcagaggatcagaggcgcaaatggtcaggtaaaaagaaaaatgagtatgaaggcctaagtggtaaaccgcgcaccgtaaagcatgataagcacggcaatccgatttatccgaagaaatccccgggggaagagtacctgatagttgacggatataatataatatttgcatgggaggatttaaaggagctctcgcgcataaacatcgattcggcgagagatgcgctgaaggatgttttatcggattaccagggctataagggctgtcatctgctgctggtgtttgatgcgtacaaggtgaagggcaatgccggaaagagagagaccttccacaacatagaggttgtgtatacaaagcaggacgagacagccgatgcatttatcgaaaagactgtgtttggcatacgtgacaggtacaaggtaacagtggcaacatcggacggactggagcagcagacggtcatgagcctgggggcactgcgaatgtcagcccgcgagcttaaggagcatattgagatgacgaagcgtgccgggatggaggcattcatatcaggataaacggtcacgaatggtaacaatatgtgtataaagagatggttataaagacatttgtatgtcataagcagagataaggagacaagaaaatggtagtaaacgaaagcatgtaccagctcggaagcgtgcgctcagcaatcagggagcttttcgagtatggtaaaaaaagagcagcaattgtaggtaaggaaaatgtatatgatttctcaataggaaacccgagcataccggctccgcagatagtaaacgacacaataaatgagcttgtgacagattatgattctgttgcgctgcacggctatacctcagcacagggagacgtggaaacgagagcggcaatagctgaatttttgaacaacacacacggcacacattttaatgcggacaacctttacatgacaatgggagcagctgcatcgctgtcaatctgctttcgtgcgttgacaagtgacgcatatgatgagtttattaccatagcgccatatttcccggagtacaaggtatttgtgaatgcagcaggagcaaggcttgtagaggtgcctgcagacacagagcattttcaggtagattttgaggctcttgaggagagaatcaatgcgcacaccagaggtgtcataatcaattcaccaaacaacccatccggcacagtctattctgaggagaccatcaaaaagctctcagacctccttgagaaaaagtctaatgagataggaagaccgatattcattatcgcagatgagccgtacagagagatagtttacgacggaatcaaggtaccgtttgtgaccaaatattacgacaacacactggtatgctactcatacagcaaatcactttcgctgccgggagagagaataggatatgtcctcgtgcctgatgaggtgtacgataaggctgagctgtatgccgctgtctgtggtgcgggaagagcactcggctacgtgtgtgcaccaagcctgttccagaagatgatagtaaaatgccagggggcaaccggtgatatcaatgcctacaaagaaaacagagaccttctgtacgagggactcacaaggataggctatcactgcttcaagccggacggagccttttatatgtttgtaaaggcactcgaggatgacagcaatgcattctgcgagaaggcaaaggaggaggatgtgctcatagtagcagcagacggcttcggctgtccgggctgggtgagaatatcatactgtgtggacggggaaatgataaagcgctctatgcctgcgtttgaaaagatatacaaaaaatataataaataatagttgattataacgaataaaaaatgcacaaattccgaaaattatctaaaactgtacagctttcggcatttttaatgtatactttttacaaaatctgtggaaaagggctccgtgtgaccgttgtgtgaccaaagaggtgtataatcttattcaagaggaaaacgtataaataaaatatgaggataagaacgcgtgctttgagataaggagccggaatataatagattatcacagagcatacatagggacgaaaatggaattaaagccagaaacatttaaagggataatgttcaaggtaaagagatcggaaaaaatttttaaaaaaatttaaaaaagtacttgcattattcgtttgaccatgatattataataaacggttcgttggtcaagcggttaagacgccgccctctcacggcggaaacacgggttcgattcccgtacggactgctaagtatttaaagccggtacattcatggaagcatgatgtaccggctttttcgttgtatatattcatatgaggcagagctatttatgagcagcagctactgcatgcttttattataaaagtatagtataacatgaaaatttctcaataaggaaatctgcccttgcaatataccctaccagggtatataattgaagacagatacccgtaaggggtatggttagacgcgtgtaacaaatgcataatgcggaacaaagaacaaatggaggtacacatggcagaaaaagaaaccaaatgctgttgctgcaaccgcaaaaaagagcggtcagagcaggaatataaggatctcatcaacagacttagccgtatagaggggcagatccgtggaatcaagcgtatgctggatgaggattgctactgccctgacatcatcacacaggtggcggccgcaaatgctgcgctcaacagcttcaataaagtccttttggccaatcatataaagacgtgtgtggcagatgacataagagccggcaaggatgagacaatagatgagcttttgaacacactgcagaagcttatgaagtagtattataagaaggcaggtataaaaatgagtacaataatcacaatattaataatagcaataattgccgcactggtgattgtgggcttaaaggagacaataaagcattcaaagggcgagggcgcctgctgtggcggtggagccatgaaggaggacgaggaagccacagtacagcttacaggcgagatagtcacaagagcagatgtgcacatagacggaatgcactgcatgaactgcaagaactcagtcacacgctcacttcagaagatgagcggagtatcggcagatgtggatttaaagcatggcgtggcacatgttgaggcaaccagagagctaagcgatgaggaaatcacatttgccatcgaaagactggatttcaaggtgacaggaattgagagattttagaaaaggcttccgaatagttagattcgaatagtagaaagaaggaaatacagacagtatgaagcaatatacagttacaggaatgagctgtgcggcatgctctgccagagtggaaaaggcggtctctaaggttgatggtgtgacgagctgctctgtcagccttttgaccaactcgatgggagtcgagggaagcgcgacagatgcgcaggtagtggaggcagtagagcaggcgggctatggagcgagtcccaaaggcacagcaacagaatcagaaaatgacaaagcaaataacagcttagagcagctaaaggcagcgcaggatgcgcttgtagacagggagacaccgaagctgcgcaacaggcttatagcatcgctcatattcttagttgttctcatgtatttttccatgggacatatgatgtggggctggccgttgcctgagtttttcaatggaaaccatgtggctatggggcttttgcagcttctgcttacagtggcggtaatggtcataaaccagaagttttttatcagcggctttaagggcttgattcacggcgctcccaacatggatacgcttgttgcgcttggctctgcggcatcgtttggatacagcgtgtatgcactttttgccatgacagctgcgcaggtgaatggcgatatggatgcggtcatgtcatatatgcatgagttttattttgaatccgcagccatgattttggcactgattactgtcggaaaaatgcttgaagcgcactcaaagggcaaaacaacagacgctttaaaaagcctgatgcagcttgccccaaagacagcaaccgttgtaagggatggcgtggagcaggaaatttctgtggatgcagtgaaaaagggcgatattttcgtggtcagaccgggggaaaatatccctgtggacggtgaaataatagatggaacaaccgctgtcaacgaatcggcactcacaggagagagcatccctgtggataagcagccgaaagatgcagtaagcgctgccacagtgaaccagtcaggctttataaaatgccgcgcaacgagagtaggcgaagacaccacactctcacagattatacagatggtttctgatgccgcagcgacaaaggcacctattgcaaaaatcgctgacagggtatcgggagtatttgtgccggcggttattacaattgcaatcattacaataatagcatggcttatagccggtgagaccgtgggctttgcgcttgccagaggcatttcggtgctcgtgataagctgtccgtgtgcacttggactggcaactcctgttgcgataatggtaggaaatggcaagggcgcaaagagcggtatactcttcaagacagcggcaagccttgaggcaacaggccgcacacagattgtggctcttgataagacaggcaccataacaagcggtgagccgaaggtgacggatatcgtgccggatgagacattttttgaggaaatcggcaagcatgccggtgagtgtcatcgtaaggcagacgatttaaacccgtactcatcaacagataaagcactgtggtcaaggaagcttcttgcaatagccgcatcagtcgaggccaagagcgagcatccgcttgcaaaagccattatggagcgcgctaaaacggatgaaatcgctgttgcagaggtgacggattttagcgctgttgtaggaaatggtctgactgcaatacttgcaggcaaaatgataaaagcaggaaatcttgcttttgtaagcaaatttgtaaaagtgtcagatgatatgcgcgcgaaatctgtcgaattttcaaaggaaggaaaaactcctctgttctttgctgcagatgacaggctttgcggtatcatagctgttgcagatacaataaaggaggacagtccggaagctgtcagacagcttaaaaatatgggtatcagagttgttatgctcaccggtgacaacgagcagactgccaatgccattggaaagcaggcgggagtggatgaagtcatcgcgggtgtgcttccggatggtaaggaggctgtcataaggaagctaaaaaaacagggcagggtagccatggttggtgacggaatcaatgatgcaccggcgctcacacgtgcggatatgggaattgcaatcggcgcgggaagtgatgtggcaatagatgcagcggatgttgtcctgatgaagagccgcctgatagatgtaccggcagcagtgcggttaagccgtgctacattgacaaatatacacgaaaatctgttctgggcatttttctataatgtaataggtattccacttgcggccggtttgtggtatcctttattaggatggaagctcaatccgatgtttggagcggcggcgatgagcctgtcgagcttctgcgttgttaccaatgccctgcggctgaatttgtgcagggtgtatgatcctaagcatgacagaaaagcaacaccagatagaaaaaacaaaacagataaaccaaatgaaagtgaggaaaaatcaatgacaaagacaatgaatatcgaaggaatgatgtgcggccactgcgaggcaagagtaaagaaggcactcgaggcgattgatgcagttagtgaggcagcagtaagccatgagagtggaactgcagtagtgacattaagctctgacatttccgatgagaaattaaaggagactgtagaggctgaggactacaaggttacatcaattcagtaatcagtcagacagtataacaatatgaagaaatatatagcattggtattggctgcagtgctggtgcttgggatttttacaggatgtggtaacaagggcaacaaagagacagaatcacagacagatgagaaagccactgagtcggtgaattctgcagaaaataatactgaggacagtacgcaaagcagtacagaaaatcattatgtggctgatacagagcagctcaccacagaaaacggacaggagagctcagttcttgcctgtccgtcagtaaacggtaagctgcatgtggagggcagcaagctcgttgatcaaaataacaacgaggtgcagcttcgcggagtcagcacacacggtcttgcgtggtatccacagtatgtgaccaatgattgctttgccacgctgaaaagctttggagcaaacgtggtgaggcttgccatgtacacctacgaaagcggtggctactgcacagatggtgacaggcagcagcttgagacacttgtgcaaaacggagtgcagtacgcgtttaacaacgacatgtatgtcatcatcgactggcatgtgctaaacgagggcaatccaaaccgctacagtgatgtggcaaagactttttttgccaaaatggcacagcagtatgcctcatacaacaacgtgatttacgagatttgcaatgagccgtgcaacggtgcgacctggggcgatgtgaagttttacgccagcgaggtcattccgtcaatcagaagctacgacaaggatgcagtcatactgataggcacacctaactggagccgggatgtggatgaggcagtcaaggaccctgtcacaggctatgataatatcatgtatacactgcatttctatgccgcaacccacaaggaggacttgcaaaacaagctaaaatcggcggcagacgccggactgccgatatttgtatcagagtttggcatctgcagcgccgacggaaacggtcaggtggacatagattccgcaaacagctggatcagcctgctcgacagctacggcatcagctatgtgtgctggaatctgtccaataaggacgaaaaatcagcgcttctaacacctgcctgcgataagacaagcggttttacctatgaggatctaagtgatgagggcaagtggctgtacggtgtgctcacaagtcatgtgacaccggtcttgaattaacgaaaagcctcagatgtacggaaaacggcgcacctgctaatgccgggatagaggcatccatgcactcagccggcatgcacatgaggcagatgcagatacttctctctggtggcaagtccgccgcggatatggcgctcggacttgttgatatcgagaatgtgacgcgcttttgcggcaagctccgggtcaatgcgaagcaacctgtcagcatccgtgatatccttgtgcacagtggatttactgatgccaaactgctttgcagcctgacgcaccgtggcattgttttcaactatgtagttggcgatttccaccgcccttgtctcaatatatgatttcaaaaaatactcctgcatattctgttgttacagtttatgcgggagtatttttaatattacacacaggttgtaattctatttacgtttttcgtaataaaataagaaaacggtttcttaaccgcaggaaagctgtatcttaagtgaattaagcgtatgcggatgcgatgagctcaatacatttatcgtatccaagcacagagctgtttagcaccaggtcataatttttcctgctgccccactccttgtcggtaaagtagcggtaatttacagagcgcttcttatcgacatcctttagcagctttttgacctcgtcatcgcttttttggtagagcttttttattcttgcagccttctcaggcttatttccctctataaaaacattcagcacatcatccctgtcagaaagaatgtagtctgcgcaacgtccaacaataacgcatggctctttttgcgcaatatccttgatgagcttctgctggatattgaaaatctggtcggaaagagaaacccctgtgatgtcgcgccccacaaatgcatatgaaaaaatgcttcctgcaggtgcatattcgccctggtttgcgacaatctgctcagagataccgagttcatttgccacatgctcaattatttttttatcgtaaaactcaatgccgcatttttgagcaatctgctcgccgataaagcgaccgccactgccaaactctcggcttatagtgattattttaaaactcatgatgaaacctcccagcctataaaagtgtttataactcattataacgtaattgcacataaaatcaaaacagaaatttaacaaaatcgcttgcagataagcactccgtaatctataatgacataagaaaacatgttgcttttacgtaatcaatgagatggcagcatggcgaataaacaattaggaggaaaacatggatcaggaaaaggtcatagtcatagactttggtggtcagtacaatcagcttgttgcgcgccgtgtccgcgagtgcaacgtgtactgtgagatttactcatacaaaatagacattgagaaaatcaaagaaatgaatccaaagggcatcatccttacaggaggtccaaacagctgttatgaagagaattctccatcataccagaaagagctgtttgagctgggaataccggtgcttggcatctgctacggtgcacagcttatgatgcataaattaggcggaaaggtaatcacacctgaggttggagaatatggaaagacagaaatcacatattctgcaaacggcgtgatgttcaaggatctgccatcagaatcagtatgctggatgagtcatttcgacagaattgcagaggctgcaccgggctttgaggtagttgcgcacactgcagactgtccaatagccgcaacacagaatgttgagaagaaattatatgcagtacagttccatccggaggtacttcacaccaagaacggaacacagatgatttacaatttcgtccgtggcgtatgtggatgtgcaggcacatggaagatggattcattcgtcaaaaacacaatcgaagaaatcagagagcaggtcggtgatggcaaagtgctccttgcactttcaggtggagtagactcatcagtgctcgcagcactccttgccaaggcaatcggcaagcagctcacctgcgtattcgtagaccacggacttctccgcaagaacgagggcgatgaggtagagggcgtattcggcaaaggaggtttgttcgacatcaactttgtccgcgtcaacgcacaggagcgctactacagcaagcttgcaggtgtcacagagcctgagcgcaagcgtaaaatcatcggtgaagaattcatccgtgtattcgaggaagaagctaagaaaatcggaaaggttgacttccttgcgcagggaaccatctatccggacgtagtggagagtggactcggcggagaatctgcagtcatcaaatcacaccacaacgtaggaggtctcccagagcatgtcgatttcaaggatatcgtggagccactcagaaacctcttcaaggacgaggtacgcaaggtcggactggagcttggattacctgactatctcgtattccgtcagccattcccaggcccgggccttggaatccgtatcatcggcgaagtcacagccgaaaaggtacgcattgtccaggatgcagactggatttacagaagcgaagtggaaaaggcagcaaaagagtacaaagaggcccacggcgaggaaccatcatggatgccaaaccagtactttgcagcccttaccaacatgcgttcagtaggtgtcatgggtgatgagagaacatatgattatgccgttgcagtccgtgcagtccgcaccgtggacttcatgacagccgaagcagccgagataccgtttgaggtacttcagacagtgatgagcagaattataaatgaggtaaagggagtcaatagagtattctacgatttgaccagtaagccaccgggaactattgagtttgaataattttttaaaaaataaaatatagaaggatttatttttcaatagtaaatgaagaaggctccagaagattttaagagatcttctggggccgtttatttatgtgtggtatactggaatatatctatatgaaaatttgattcaaagccttatccaagtaagatatggaaaatcagatgctaaacatatattgcagaaggagaacattgaatgatagatatatatacggagcggaaagattcaaaagactggattttttacaatgacttgtacttcaacctgaatacaggaaatgaagaaatgtcgcaaaaagaaattgatttgattcaacaagtggatgaggcgaagctgacaccagacaagcatatagaaacaaaatatggcttaggtacgatccgaaatttgtcatctggctgcaagacattgcttaatattgtaaagcatcctgataaggtggtaaatgttgaggaatgtggaccgaatgttcttaaaataatttttactatggataatattaggatttatatgtcaagaccaacgctttttgatattccggatgatgccaaaatcagatttaatgattctgatatagttaccggtggcagaggatataatgcttggtggagtaaggagtatcaaaggagagaagcagatgatttataagaatataacatttaaagcagctccattttcatatgatttgacatttgatgacaggattactcttgttggtggagatagcggtacaggtaaaacagtactttatgaaatgctggaagatataagattgacagacgaatacaaggctatcaagctgtttaattataaatcagatgattttttagaagcaatcaaacagtgcagagatagttttattgtgatagataatgcagattgtatgattaatgatgatgtcaggagattcattaattttgagttgtctaatcagtatatgctttttctacgaaattgtgacggactcaatgtatctgataagagctttaaggtgctgaagtttgataataacaggataacgctggaagaggagttgtgatatgagatatttattgacagaggataccggtgctgggcttcacttctggaaattagttaaccaacttttctttaatgatgcacttgtggtcgaaagtaaagaaagcaatcagggattattggatgcagtattagacttgaatattaaagaggataataaatactatattgcatttgattatgtggttgataatcaggacattcgcaacaagtatcgtatgttgaagtcaataacagataagtcagatggaaagattgtgattctggatatgatttgttttgagtacctgattcttgcatttgacaagctggtagaatggacaggcaccggaaagacagataaaataaaaatccgtgagaaggttttgggggtagttgagaatcacagaatcgatttatcaaggattgatgatgagaaaacattacagtacatagcaggatttaagagatactctacagagcgtgtgatgaagtcattggtaggtgaatttacacaaaatgaaaagtggtcggtgaagggaacgcttatgggcgagtgttggtacaaagattgttgtgtgtcagagcatacggataatcttaggtgtggtaagccagaggttgaaagtggggatgagaagatgaggatgctgatacggtcagagaaagtacaaaggctaatgagagatattactttgaaagaatagtttaataagactatatttttcataatgcataataaatgatacattaataagacaaatttttagcagaagagcaaaggggaatgtgaatgcaggaaacagttgatgttttgaatagaggacaatttattgatatgttatatcagcttgtcaacactatgtcagatttaaaacaaggaaaaatattttcaattgatggaacttggggatatggaaaaacttatgtattagaagaacttgagagaagattatctcctgttgttaatgaggatacctatgatgataaattttatgtttttcattataattgttggcaatatgattattatgaagaaccttctgttgcgataatatcagcaatgctagaagcctctgaaaattcactagaacatagaattaacaaagtagcaaaagcaggttgggaaacagcgaaagaaatattgacagaggtagctggagagtatgtaaaaaataaaataggtgttaatattgtagaaatatttcaaagtgaaaagacgggcattgataatcaaaaatttaaatttgatcaaatgtttgcgtttaagaaaactttagatgaaactagggaaaaacttaaacgaatgtcggaaataaaaactgttgtaatagttgtagatgaactagacaggtgtatgcctgaatatgcaattaaagttcttgaaagacttcatcatttatttgagggtatcccaaatacaattgttattatggctgttgacagtaaacaacttgagaattccgtaaaaaaaatctttggaaatgcagttgatacaggtagatatctgagaaaatttattagcttcaatttggaattaggcgtgggagagcttcaatctaaatatgtagaaagatataattattattttgaaaaatttgaggaaagggatgcggcagcagaggagttacaaacattagctactttgtgccaaattgacattcgaaatttgaataagctaattgaaaaattggatataattcacacacttgcatttaaagggaaaatgtcagaatcagttttatggtttgaattaatgtggggaatgataaaatataaaatatcgttacctgataaagaaggaaaatatagtgataggtctgatgatttgtattggctacctgaaatagatcatgcgacctatggagggttagataactatctttctaaagatataattgaatatttaaaagagaaaaagaacattgctatgacacatacaagaataacaggaatgaatagtgaagaaataatggtttcgaatgatttcaatggagaggcatggcatatattagatcagcttttggcacgtaaaaaaacgctatatatgaaccctgttaatcaaacagtagatattgatgaatgtaagaagtttattgagtttgcaaaaatattatggtagtctaaaattcagtaggtccatatctcagaataaaattagttaatttatatgtgggttataaagaaatagagttggcagatttgataaaaaatcttgaaaatattattctggcaatttagctaaaggagcggaatgaatttgttatttaacttggcatattgaattatatgtcaggttaaaagccaagttagatgtataattagaataattcgacgcctttttcaacgcataaaaagcgacgaaaaaagcgatgaattattatatcaatcaaaagaaagttaaaattgatgtcagattagttcaaaaccataatgaagctacataaacttaattaaattcattcatagcatccacatattcctgtaatccattaggtttacaagccaattcagcatatagcagaggactttcctgtgccagccgatatagatacgcgatatcatcaggtgtatcgagcgagacggctgaattacatttttcacaactgatagtaagaggcgtgccggtatatgtatcattgatggcattaacaataacagaatttgtatcacgttcatacataccaaacaagtaacaagggttattttgtttcatggtgttctcattcccacagataattggcaccatcaagcagatcaatgatggctgtaagcatattgttatagtcggtttgcagttccttgatttcatcgcttgtagggagattgttcaaagcttgatgttcacagcattcggtaaatgttttctgcattttaagtaattgcagatacagagcattaatagtctgtacaagatatccggatagagcagtgcttgaaggtgtagtaaatgcattgattcatagaaattatctggagataggtagtgaagtccatatagatatgttcgatgatagaattgaaatatattcacccggtggaatggtaagtggaatatctcttgaggggaaaaatctattgaaaattccgtcaaagcgaagaaatccgatattagctgatatattcagccgtttaaaatatatggagcgtagaggtaatggatttaagaagatattggcagattatgagggacaagtagaatttgatgagaccaagatgccagtctttgatgcagataatgatgattttacattgactttgtataatctgaattatggcactaattatgcaacacatgtgaatgaaaatgtcatagaaaatgtcatagaaatttcggaagaaaaaatgaagcagttaatgccagagtattctaagaagaagcttactaaagcatgtgagatcctaaaaatgatttccgaaaatccgaatatttctattgatgaattaagaatagccttagatgtcacagatagaacaattgctagatatatatcagaattaaaggataaaggtatcatagaacaaaaaggtccagataatggtggtaaatggaaaattaagtaagtgaatgacagtaaatatggcactcaatgtgacacccaaacttttattcaagaatattccgaagttagtctcaatgaagtctcacgagatttgagactgaggaggttcaaaatcatggacataagcaaaaggaattggaaattatttcgagaaagattatcaggcaggtttattaggaaatagataaaatgtatgagaagaatgcactaaataattttaaagatgtattgggaaaatattgcgcaattaatcagtttgttgaattgtcaaaaaggtgttttttggttgaacatcaaaacgagatacagaaaagggatacatttgtgaagttagcaacagaatatgcagtaactctgacaaattatgatgcagattcgatggtttgcgaaatatgcagaagttatattgttaatgttcatttgtgttttgaaacatttttgaaagatgtatgctggcagataaataaatacggaaagaatgaatataaaccgagaattcaagaagagtcatatttatcatgtgcagtcagaaatatttgtggtaataacttatctgatgatatgaaacctttgtatgagttatgtgaatactatcgactaataagaaatacttcggttcatgatttatgtgaggttgattctcatgaaaaagaatatcgtaaattacaaaagtataattttaagaccgaggctaaattttcaaagctagtagcaccaaataaatatgaagaaatatcattcgatgattttgttatgttttctagatcttgtgttgaattggcaacatacatttttgagaaaatggcttatgattatacaaaaatagctttggatattccagataagcaaataagtaaatggcggaaatatagtaaaaaccgtcaagagaaagcactttgctcgtacataaagaccttgtataaggtggatgaagagttcatagagcaaataccaaaacttattagcatgattattgacccgatagtctaatggtagggcgtcccccttcataagtgcatttgcaacagtgcacttatgaaggggaaagatgtggttcgaatccacatcgggtctttttatagatattactaacgaaaacgcaggagagaggtgttaatgatggcgagttcttattatcaaaacttaattaaacgtgttttagaagcatctacaacggataattgggaaatagcagtgcgggaatgggatattgttgattgtgaagaagatgaggaacatgcatcagaatgtgtatgtggaaaagagaatctgagatacttatttacgattagaaatagagaaacaggtagaagtttatacccgataggatcttcttgtatagaaaaatttgagcgagatgatttagattatgaagtagatgttcaaatggatatgtatcgtttagcgcatgctatggaaagaggggaacgaatagaattaacttcaaagtacttttcgaagaaattactatatgcattgtatgaagaaggagcatttgcacccaataaatataataggtatgatggaacaaatgattatcagtttatgttggatatgttcaataaaagaaataagagtgagattacagaacagcagcatagaaagataagaggtttgatagcatattccatcaagccatttttaagagaacgactaaaatataagtgaagtttatataaataacaatagaaacaaatagtaatttagcaaaaggcatgatttatcagatttttactgacgattgtagcagaaagtaaagtatacctgagcagacaagttaagagaaatcttgcaaaggcaattgattttattcagtacatagaaattggtcgtggtactgcccattagtaccacaaaatttctagttgcagaaacatcgtctggagattataatttccataggttgacttgcaaaccatcagattattattttctgaatagtaaacaaacctgcaagccactagaactacacacaataatgacaatatagcaatggtactggattggtactaaaaatatgtgaaacgaaaaataatgtatggaaaaggcatgagttatcaatactaaatggtatagataactgtattaaaataacctgaatcaaaccagactctgcgagtttgaatagacgataaattgtgggaatccgcttaaatagtgggttcccattttttgtggttgcaattattttgcattcactctttttaagaatcttaagccggatatcatgaccggcatcaatcactcattcgagtaattttcacatatataactatctacaaacattttcggattttcgaaaatcatatgccacatatcttttaaaaaaagatagagaaaatttaagtaatcagttctgactcgttccaaatagaaggtgaaagaggaaggttttttactttgatttagtaaagagcttttttcgacccaaatgtattatgagggatttgaaaaagctgtttgaaagaattttctttttattctagtaatgctcctcttactgaaccaaatgaattgtgagagggaaagattctaaaaaattcgaagtggcttacggattagagaaaagatgtcccacataacttatgagaaagcaaagtaggtgggcgcatggctcagaaaatgtatgtggatgtaaacgaaatcatgaaagattgggggtgttccagagcaaaaggatatcagattattgcagaacttaatgcacagcttctgaagatgaatccccactccataattatacaaggcaagtgtaatagaaagtggtattttgaaaactgttatggtgccttggatgatgagggcgaggatggtggcttggatgaagatagttaaatcggaagcatcgggacaattcttcgttgtaggtatggatgtggcaaaggatcagagactaaatttaacagaacgaggaatgttgctcaccttgttgtcgttgccgcctgattgggattttacagtggaaggaatgaccaagattcttccggatgggcgagatcgcataatataaggctcaaatgcgtgagcaggagatacagaaactggaaactcaggaaaaagaacttaggagaactcttcgtagtcttcagagccttattaagcaggcggaagaaaagttggaagaagcaaagaaagaagctgcaagcattattgaatctgcaaaagcaaaagcaaatgagtggcttgaaaagattaatattcgactcggcttgattcccaaaaaagaccttgaagataagcggctagaactggttggctattacagagcctgtgagccttatcttacgaatgatatgaggattgccatcaacaacgaagatgtgaaaggctttggagcgttagtaagtcgactgacagcatccaattctgatgggacagtcgcatgacgtgatccgggatgggaagaactttttgattttgaaatcaagtttggagaatatcttgagatgaagaataagaatgttaagacagaggatatacttaaagaattaaataaccctgaattacataataggatgaaaagaagagtataacaaaaccaataaaatcaacggtttgtagaataattgtccgatttaaaaatgatttcagaaagtgttgaaaatgtaccgcaaagggaatataatataaacgtatgtttttattatttggaggtaaatatgagttttgcaacaactactgaaatggctgaaaaatggagcatttctagaagaagaattactcgtttgtgtggtgaaggaagaatagaaggtgctgttttaaagggaaatacatggttaatccctgatagtacagaaaaaccagatgatcctcgccgcattagaaggaatatgcaaaatacattttacaatatagtgtactcagttaaagaaaaaaagttttcgacaatagagttatttgcaggtgctggtgggttagcattaggtgtggaagaagctggctttaatacaatcggattgattgaacttgatagagatgcttgcgatacattaaagaagaatcgtcccaattggagagttatttgtgacgatatagctaatatctctaaattggatttagaagattactttggaatcaagaaaggtgaattagatttactgtccggtggagcaccatgtcaggcattttcatatgcaggtaaaagattgggacttgaagatgcaagaggaacattgttttatcactatgcgatttttttggaaaaattacagccaaagatgtttttgtttgaaaatgttagaggactgttgacgcatgaccatggaaagacctatcagaccatgcttgaaatttttgagaatgcaggatatgacattcaaaagcaggttttgaatgcttgggactatggagttgcacaaaagagagaacgtcttatcacgataggtattcgtaaggatttaaaagaaaaaataacattcgaattcccagaggcacatgactataaaccagtgctaagagatatcttagaaaatgttccagagagtgtaggtgtgccatatggagagaataagcgtaagctttttgaacttgtacctgccggtggatattggagagatatagacccagaattggcgaaagcatacatgaagagttgctgggacatggaaggtggaagaactggaattttaaggcggttatctatggacgagccttcattaacggtacttacttcaccatcacagaagcaaactgaaaggtgtcatcccttggaggcaaggcctttcactgtaagagagaacgcaaggtgtcaatctttcccagatagttgggagttctgtgggaaggttatgtcacaatataagcaggtaggaaatgcagttccggttaatcttggatatgaagtagcaaatatgatatatgaagcattggaaggagcagaggactaatgagttgggaattatcttttatttcagagaaagattttactaatcatgtaaaagatacgattgataaatacggggagaagctggagtcgtttgacattgtacgttttaacaagaacattgttgatccgattaagatgatattcgataaaactgtatatcagacatcatgggatgaaatcgttggaaatgagatttttaggcaaagagacaaatctaacaataatgacatcggatattttcatcagcgtatttttcagtatataaataattgccatgttcctgataacggaacagaaggtggttgggatgttatatttcaagtgcctgaaggaataacgcttccggaaggggatattgttcatactgtttatgtagaaatgaaaaataagcataacactatgaactctgctgcagctggcaaaacatatattaagatgcagagccagttattagatgatgacgattgcgcatgctttttagttgaagcgatcgcaaagaaatctcagaacattaagtggtccactactgttgatggaaagagcgtttcgcataaaaagattcgtagagtaagtttagatcagttttatgctcttgtaacaggacaggaagatgccttttataagatgtgcatggttctcccaaaggttattgagaaggttgtcaatgaaggtggagaagatgtcaaagtaccacatgattctgtaatgagcgaacttcgtagaattgctaaggagatgaacacagatgatgaaaacttggcaatggctctagctgtgtacttgcttggatttagtacatacaatgggttctcgaaagtcgcaggcaatgtagttgatgatgttgatgaaaatgctttgaaacgaatttatgagtatgcgaggcgaatagtaaagaaggattaaatgggggatgtgcaatggacgtaataaacataatttctataatcgtttctccgattatagcagtgatagtaggacagattctacagaataacagcaagaaacgtgccgaaaagttggagatttttaagacccttatggttagtagagggctagggtggtctgtggaaagtgttagagcgttaaatgttattgaagtagtatttggtgatgataaaaatgttttgaaccaatggaaaatatactatgacagactgtgtgttgaaaatccaaatgaaacagaactggcgaaaattaagagtgagggagataaattacttgaagtgattgctaagtcattgggatataaaataacatgggagactatacaaaaaccatacatacctaaagggttgacagataatttgactcaacagcaacaatatatgaacaatcaattatctgttatgaatttgatgaactcttatatgcaaaatatgagcttaaataaaacaaacaaacaagaaaagctatagaagaggtgtgatacatgaaaaaaatagtggataaaccaatcaaaatagatttacatattcattcgtttttttcgaatcataaggatggaaagaaagttgcgtttaatacagaagaaaatattcctgttcttatagctaaactaagacagaatgaaatagatatgtgtgcaattactgatcatgataggtttagcttagatttatacaaaacactgaagttatacgagggaaaggaactgcttaaggttttacctggtgtagaattctctgtaaagtttgatgggaaaaaagtcattcatattgtgacggtttttgatgataaagatgaagaagggctaaaacggttagaagagtcgtttgtaaagggaatcggaaaagagaagtatattgatggtgcttacgagagggatgattactttgcaatcttgaaagaagtgggactagactttgttatgattgcacatcaaaagaaaacacctacgtccactcaaaaacctcacaaatccgatgtgatgtctcttgggagagaaacatttaacgaattattatttatggaatattttgatgcttatgagtttagacaacgcgataatgagattttcaataagaaattttctttagataataatgttaaggaaaaactaaggtttgtaacaggatctgattgtcataattggaatttctatcctaactcaagtgagaatgaagacgatgttcgattcacttatttaaaagccttgcctacgtttaaaggattggtaatggccattacagattaccataggattaattattcgggtagtttttggggacagggaagatatgtaaaagagctttgtattaatatccatggaaagaagaattatgttcctctttcaagaggaataaatgttgtaataggtgataattctataggaaaatctttgttgttacatgaactgactgaagaacgtgctattacatcattaccaaaactaaaaaaaggttatgaaaaatatctttgccaaaatggaattgaggttgagactaaaatagctgaaaaagacatatttaaatttaattaccaaggacaaattcgggaaatatttgaagacgaaaatttaaaggctgacaggtatttagctgagttctttccaaacgagattgatgcgcagggatatagaagaatagtagaacaagaactggaaagtttttataagcgtttagagtataaatttgattatgatgataagattaatcaattgttaccgcttgagttacttgatgaagaggaaattgaaaatgaattggtgttgggaattgagctggaaacgcaagatatatcaaaactacaaaaacttgtagaagagtttaagtctgttatttcaagtatgaaaaaaggtcttattgctaattctgagttagatgaaaaagatagaaaccatttggaaagtgaagtagagtttttggaaatgctacttcaaaaatatagcaataagtatgaaaaggcaaaattagaaagaacaaagattaatgcttttaatacggcattaaagacttttaaacgcaaatatagcgaacggcaaacggatcaacaaaatagacataatgctttttcggaagaaaagaaaatactggctgagaatatcgcgaatcttataaaaacgcggaattctcttacgccttatgaatgtcttatagaagaaacagaggttgaaccagaagttaatccggtagatgcctttttgtttgtttctaaaatagctatagaaaagattgataatgcttattttgaagaaattctaaaaggttctttaaaaaagggaaatagaattcaagttgaggagattacgagagaagatctacgaaaaatgatttctcgctatcctacagaaatagatgatccactggaagccttaaagtttaagattaaaacaagacttgatgctgattttaagccgataaaggcaataactgagaatgggaaagatgtatacacggatttatcggcgggatttaactcgcgaatatattttaaactattaagtggtgaagagaaaaataaggggatatacattattgatcagccggaagatcatatatcacaaaaagcaattaaagaagatgtgctagaacaatttagaaacatggctaaaagacgtcaaataataatggttacgcataatcctcaatttattgttaatttagatgtagataatgttatttttcttagtaaggagaaagaagttatgatacaatctggagcacttgaatatgaagatgatgaatacagtattcttaagattgtggcagataatattgatggaggcatttatactatacagcaaagggtaaaacgatatgaaaaaaacatataatttgggttatgaaaaaggaaagtattatctcgaatattctatgcctaaaaatgatgaaggaagacttgttatagatgaaaaaaagatggaactagattcggttaagctttacaaaatgttttttgaaaaagcaacagaaagcatagaaataattattgataataaaatcgatgaaaataacgatgagcaagtgcgtaagaagggggcaagggtttgcgcgactattcaatctctttgcgacgagatttgcaaagagattaataagaaatgcttcgaaggtaaatattcttaaggtgtatgatgaaatagagaaaaatcagatttttggaacaaaagaaataaaagaaattcttgattgctcaccatccacagcaagagtagttatgacaaaacttagagacatgaaagttgttaaagcggtgaatggtaaaggaaagggaaagtatgtattcatagaataaaaatgagatatagagtattcctgaatgtaaaagctctatgtgtggaagtcaggagaagatgaaaactgaattggttaaaggcacaaatttggtttaagtaactcttataatgaagatggggaatgtcatagaaaatgccttagaaatgtcatagaaaatgtcatagaaattttgagaaaaatcaagtgactaaaatcagaatattctaagaagaagctttctaaagcgtgagagacgcttaaagggttttctgaaaaacgaatatttcaaagtttgtctcaacgaagtctcacgagatttgggactgagtgagactctatgatatagcaaaatgtgataaaaccgggattcgcaggtgaattataaagttgtagtctcaagtcagtctcatttttgaaattgtttgttgagactaacttgagactgaggaggttcaaaatcatggacataagcaaaaaggattggaaactatttcgagaaaaattatcaggctggcaggaaaattatatagaaggtcttgttaaagagtatgcaaattttctgaatgatgatataaagcctgcatcagagaaattctgggaacttgaaaaacggataaaagaagataagcgtcatccgggtgttatcatggaactgaaaaaatcagaggtaatatgggatattgttcgtcttattagactgaaagtaattatatatgatgatttatcagaattcagtggagaattgaggcgggaagtgaaaagaatacttgagatgaatagataatgacggaaagggaggtatgacaaatgcgtgatccaatagagaatgtgacgagattgcagaagcagttgaacaatctgcaattggagaatcaggtattaaagaacatattggataaagcgggactgtcatatcaaaatgaactggcaagtataagggaaacggatacgaaagaggattttgatccagaacagggtaaaaggattgtgcaccccaaagagattacagacaggatggcaaagctatttttctcattcttttggggaagaacagatgtatatgcgaaaagaaatgtaaataaaaacggagaggcggcatattatccgcagtgtgataatttctggtcagataattgccataggaaattaaatacacatatagactgtaaggattgcaaatattgttcgtatacaagattagatttaccaaccatattgatgcatttgaggggaaactcttatgctgcaaaagatgtaatcggtgtatatccattatttagtgatggaacatgtaggtttctggtgtttgactttgataatcatgagaaggatgcagaaaaaaaggattttgcaaatacagatgatacatggattgaagaagtcgaagctatgagagatatctgctcattaaatggaatagaacctttgatagagcgttctcgttcaggaaaaggtgcacatatatggatattctttgacaagccaatatcggcggcagtggttcgtaaatttggcttcgcacttttagataaaggtgcagagcaggtgaatttaaagtcattcaattattatgacagaatgttgccagcacaggattccttagaaaatgtggcaataggaaatctgattgcattgccattacagggaagggcgttgaaagatggcaatagtgcatttgtggatagtaactggaatgcttatcctgaccaatggaatgctttattaagtaaacctaagctttcagagaaatttctggagaataagataagggaatggacatttacagcagatgaccttgaagcatccagtgatgaagaaaatagggaaaagccatgggatagaatgaaaaattttgcaaaatcagatgttgatgggaaaatggatatcacattatcaaatggtatatatgtcgacagcacgaatcttaagcctgcgatgcaaaataagattcgcagaatggcagcctttagtaacccagtattttataaaaatagtgcgattggaacatctaattatgatacttcgaggtggatttatcttggaaaagactatcttggtggatacatacagattccaagaggattacaggatgaattaatagcaaatattgataaggcaggaattgaatatactattgatgatgagaggcagcagggaagaaatattaatgtagaattcaatggagaactacgacctgaacagaacaaggcgttaaaggaactgactaagcatgataatggaatacttcatgctgcaacagcatttgggaaaacagttgtatgcagtgcagtaattgcagaaaagaaagtgaatactctgatcctgcttgaatcatctgcacttatagaacagtggaaagatgctctaaacaaatttttaattatagatgaagaactaccccagtacaaaacgaaaactggaagattaagaactagaaaaagtctgattggaacattacagggagcacatgattcaatgactggaatcatagatattgcaatggcaggctcattgtgcaaaaagggtgagtaccataagttgttgaaccattatggacttgtactaattgatgagtgtcatcattgtgcctctgaaacaatagcaaatgtgctaaaagaagtaaaagcaaggtatgtatatggtgtgacagcaactccgaaaagaggagatggactggaaaaaatcaattatatgctgataggacctataagatatagttacacagcaaaggaaaaggctatggagcaggggatacaacatcttgtatatccgcgttttacccgaactgtacctccaagaggagtgattaatggtaagatgcatccaaatgaagcatatgatattattcacaataatgatataagggatgaacagattattgaggatattaagaattgtgtgtcagcaggtcgcactccagttgttttatcccgatacaaggatcattcagagaaactgtacaagcgattgaaagattatgcagaccatgtattcttaatgacaggcaacaactcaaagaaagaacataagaagattttggaacagatgcatcaggttgataaggcggagtctctgatattaatagctacaggttcacttgtaggagagggttttgattttccaagactggatacactttttatggcaacacctgtatcatttcgaggagttgttgaacagtatgccggtcgattgaatcgtgattatgcaggtaaagaaaatgtaataatatatgattatgtagacaaccatattacaatgtttaataacatgtatatgaagagacttaaagcatataaacagattggatatgagattgcaggggggttgcataatgataaacagacagctaatgcaatatacgacggtgataattatgctgaaaattatcataaagatttactggatgcaaataaaaatataatcatttcaagccctgcaattagtgggacaaaagtttatgaacttattaatctgctaaaagaaaagcagttatcaggtgttcagattacgatagtaacatgggcaccggattcctatggatttggagatgcagcatactggatgcagctacatgaagaaatgcgcaaagctggtttctacattaaaacagtagaagagtcatgtgaacgttttgctgttattgatcaggaagtcgtctggtatggaaatattaatcttttggcgaaggataaggttgatgacagtattatgagggttttgagtaaagagatagccagtgaattgatggaaattacgtttggagataatggttgagctgaataggactaaaacatgtggagtcgataagatgtaaagaagacgtttcatgagaatagagaaaggaatgcgtttatgagcaaagaattacagataagaaatagcactgttgatttcttggttttcacacgagatgcaggagaagacggaatagaagtcagggttcagaatggcgatgtatggcttacgcagaaagcaatttcgcagctttttgatgtagatagaagtgtgattacaaaacatctgagtaacatttttaaagagggagaattagatgaaaattcagtttgtgcaaaatttgcacaaactgcggatgatggaaaaacatacaattataagttctattcattagcggctattattgctgtgggctatcgcattaattcagaacgggcaatgcagtttagaacatgggcaacaaaggtattggatacatttacaaagcagggttatgttcttgataaaagcagattgattaatggacagattttcgacgaagattattttgagcatcttattgctgagattcaggaaatcagagcaagtgagagaagattttaccagaaaattacagatatatatgcaacagcagttgattatgataagaattcacaggtgacaagagagttttatgcaacagttcagaataagatgcattatgcagttcatggtaatacagcggcagaagtgatagtggcaagagctgatcataataaggaacatatgggacttaaatcatggaaaaatgcgcctgatggtaaaatagtaaaaacagatgtttcaattgcaaaaaactacttaggaaaagaagaacttgcagaattaaatgagattgtgacaatgtatcttgattatgcaacaagacaggcacgaagacatattcctatgactatggaagattggaaaacaaagcttgacgcatttcttagatttaatgatgcagaagtacttcaggataaagggaaagtaacagcagctattgcaaaggaatttgcagaaagcgaatttgagaaatacagagttatacaggattcactatatgaaagtgattttgataaattgatgaatgatatggaaaaggatgatgctatccattagtaccacaaaaagtctgattctaaaaaagagatgtgccagctgtactctgatttcaatcaatccaccacttcaaaattttcttgcaactcagttattatagttatataattctagttagtttaacctaatcaatgagcgggcgattatttgtacaataatataaaattttgtaactgttattgttgatgaaaggcgggatgattatatgacagttcaagagtgggaaaaggatttttatggaaataatgtaacaatcacaacgagagataatgaatgcgtcatttatagaattcgggacgattcgggagattcagttctaacacgttttgaagtttatcctgggattgcactgatttacaacgatgtacatacagactatatttcaattaaggagttagtcggatatgagaacatattggaaatcaatcattgtcgtgaggggagaattgaatttgaatcatcagaaggagagtgtttatatgtgaaaaagggggatatggcaattaatatgaaagctggagtaaagtcatattcttatttcccacagtcacattatcatggcgtgacaatagaaattgattttgataaaattgaaaaaaatcaaaacatgattatgaaagaaatgcaattgagccccaaaattttacaggacaaattctgtaatcacaagcaatgtattgttctacatgaaaagcaggaatttgaacatttgttttcggaaatttattgtgttcctgaacagataaaaaagagctattacaaaattaaagtgatggagattctgctgtttttatttgcgctggatacaacaaaggagaagattgagaatcgttattttaacaaaaatctggttgcaaaagtaaaggagatacaccaatacatgttaaatcatatagatgagaagttaactattgcttgtctggcagataaacatcaaatctctgcaacgaatcttaagaaatatttcaaggagatttatgggctgagtatatatgcatacttaaaagaaaagcgcattcaaaaggctgcagaattacttagggaaacgaaccatgaaataggcaagattgcaggcatggttggatatgataacgcaagtaaattttccaacagttttaaaagcattatgggaatcaatccaagtgaatataaaaagtctgtctgaatggagcatttcatactttttggagtagatgaaaattgaaacaatgattataatatcaaatgagtttggcaagatgtttgtcttgccttttattacaataacaagttagacactactaattttaggaaggagcaacaaatatgaacaagacaactaaaagttcaagattgcaaggaaaggatttgatgaatattggaatatattcggctatttactgtgtcattgtaactggtgtagcgatgcttggctatatcccaattatgatgccgatgttatgcgcgttagtaccactgattgctggagttccatttatgttatttctgacgaaggtaaagaaatttggaatgatatggattatgagtatcatcatcggaatctttatgattttaaccggaatggcacattatgcgttgattgtgggattttttacaggcttaattgcagaactaatttataaaagcgggaactacgcaagtcagacaaaagctgtgcttacatgcggcgtatttagcatgtgggcgtggggaaattttattccgttattttttaacagagaggcatattgggcgacaagacagagttttggagaagagtatattacgactttaaatagtctgatgccaatgtggttatgcccagttcttttgattgccagttttgtttttggaatcataggcggaatgtttggaaaagcattactaaagaaacattttaaaaaagcgggaattgtataatgaagaatgaaatgatgagtagtggaaaggggaaacgaaaaataactcttgatccaagaactaagcttgctttacttcttatggtagctacattcgtgcttggcggtgcaggcggaaatgagctgatatgggcaagaattttattggcaataataccagcaatactacttctttttagcggtaaggtgaaagcttttttcgtctttgagatgctgtttttggcaggatgtcttttacagtattatctgcttggaaagctgagcggtttttttaatttccttgtgttagcaacagcgggtattctttcccagtttatacccgggcttatgatgggatattatacagttacaacaacaactgtcagtgaatttgtggcggcgatggaacgtatgcatatgccaaagcaaattgtgataccgttatcagttatgtttcggttctttccgacggtaggagaagaggcatcaagcatatcagatgccatgagaatgagaggaatatcctttggtggaaatcatccgggaaagatgctggaatatcgattgataccccttatgacctgttctgtcaaaatcggagatgaactttctgcggctgccttgacgagagggcttggagcagatgtgaaaagaacaaatatctgtaagattggatttcgttttgtggattatattgttttgctgggctgtatcattactttggcatatttattgctggttaagattggaggctttttatgattgagttacaaaatatatgcttcgaatatgggtcagaggaacaaaatatagccggaagaggggcacttcataacatcaatttacatattccagatggacagattgttttattgtgtggagaatcaggatgcggaaagacaacaattaccagattactgaatggattgataccacatttctatgaaggcaatcttaccggaacgatttgtattgatgggaaagaaatcaatgatcagccattatatgaaactgcattactgtctggaactgttttccaaaatccaagatcacagttttttaatgtggatacgacaagtgaattagcatttggccttgagaacagaggcatggaagaaacacaaattcttaaaaaggtagataaaacagttcaggaactgaaattggagaaactgatgaatcgaagcatttttgatttgtcaggtggtgaaaaacagaaaattgcttgtggatgcgtatctgtctgctcaccgaatattatcattttggatgaaccatctgcaaatcttgatttaaaatcaatggaacagttgcacgttatgattgaaaaatggaaagtagaacacaaaacagttgtgatagcagagcacaggcttgcgtatatctggaatttgatagagcgcatggtttttctaaaagaaggtaagattgaatttgattttagcaaggaggaaatgcaaaagctgactccgagagatctacaccagatgggacttcgttcaaaccaagatgtaaaaatggttcattataatcgaaatgagaatatagaccggattgtattcaaaaattttgtatttgggtatgagaaaaatcataatattctgaatttgaaaacaatggaaatagacaagaactcaataacagctattgtaggaaataatggaattggaaagtctacctttttacgatgtatatgtggacttgaaaaaaagtgtaaaggaatcatggagattgatggaaaagtatataagagaaaagagcgcttgaatgaaatatttcttgttatgcaggatgtaaaccatcaactttttacagaaagtgttttagatgaagttttgattagcatgaagaaagagaatgaagaaaaagcattggatattctaaaatcactggacttattaccgtacagggagcgacatccggtgtcgctatccggaggagaaaagcaaagagttgcggttgctactgctatagcgtcagaacgttctgtcttactgtttgatgaaccgacaagcggactggattaccgtcatatgcttcaggttgcccgcttatttgagaagctacgcaatcatggaaaaacaattctggttgtgactcatgatttggaatttatagaagcattacatgcaaacacgatttgtttggaagaattgcaggcgtaaagaaaggaggattttttgtgcaaaataaagaaagaggtgcagtcagctggcttatggaatttgcgggtgaaaaacgaatattttatatcgtgagtgtgattgcggcaattatcggtgtcatatgtagtgtggctccgtttttatttgtaagcgatattgttatacgattgattgaaaggaaaacgcggtggagtggatatttaatggatggtggtgcaattgcagttttatggatgcttcgttatctgtttcatggcatttcaacatgctgttctcataaggcgacctttcaggtactggcaaatattcgcaaacgtttgtgtgataaattagcaaaagtaccactgggaaaggttaaggatacaccgtcgggtgcactaaaaaatataattgtggaacgtgtagatagtattgaaacaacactggctcatgtcgttccggaattcacatccaatctgttggcacctgttgttgtatttatgtatctatgcattcttgactggcgaatggcgttagcgtcattaataacacttgtatttggtattgttgcatatatgtttatgatggtaggataccaggaaagctttcagaatacgattaacaagactaaaatattaaatgatactgctgttgaatatattaatggtatcgaagtaatcaaggcatttggaaaagcacagtcttcttatgagaaatttgaggttgcagcaaaagaaggtgcagattgctatgtagaatggatgcgccgttgcaatgtgcctttttgtattgctatggttgtaatgccgtgtacagctcttgctacagttccaataggcggttttttgtttatgaaagggagtctgagccttagtacgctggttatgtgtttgattctttcgatggggcttgttacgccactgattacagttatgagttatagtgatgatattggcaaaatgggttcgattcttggagaagtgacaggggtgttatcatgggaagagcagttgagacctataaatgataataaacagataaaggattattcaatttgtttagaaaatgtaagattctcttatagggaaaaggaagtacttcatggcgtaaatcttaaaatagaaagtggaacagtaaatgcattggttggaccaagcgggagtggaaaatcaactatagcaaagcttattgcatcattatgggatgtagatagtggcagtatcaaaatcggtggggttgatataagtgagttatccttaaaaaactataatcgtaagatagcctatgtttctcaggataattacctgtttgataatacgattcgtgaaaatattagaatgggagatttgaatgcaactgataaacaagtagaacaggctgcaaaagactgtggctgtcatgagtttattatggcacttccggatggctatgatacaatagtcggcagcgcaggcgggcatctttccggaggtgagagacaaagaatctctatcgccagagcaatgctaaagaacgctccgattattatcctggacgaagcaacagcatatacagatccagaaaatgaggcactcatacaacattctgttgccaaacttataaagggaaagacgttaattgttatagcacacagactttctacgattgtggatgcagaccaaatctttgttatagaaaacggaacagtggcagaaacaggaacacataatgagttgttagctaacggtgaaatctattctaatatgtggagagcacatatgagtgtgaaagattcagaacaggaggtggagcctcgtgcttaggatattaaaaaggttctttgatttctgtggtgcagaaaataaaaagaaattttataaggcattgtttttgggtgtggtatttgcattattggaggcagtaaaaattccggcgattcttttgttgattgatggagcaattaaacaaaatgttaccgaaagtctgattgttctatgcttaggaatgcttgtagcaagccttgctgcagcgtcagtagtaaaatatcagattactatgttacagtgtgaagcaggctattataccgcatgcggaaaacgcattgagattgcagaacatatgcgatatctgccgatgggatatttcaatcagaacagtcttggacagatcaccaatattacaacgaatacaatggaacagctggctgatgtggctaccagagtggttatgatgacaacgggcggtgtccttacaagctctgtaattacagtaatgatgttaatctttgatataagaattggctttattgctatggtcggcatggttttgttttttactgtaaatagtttcctgcagagaaaaagtaaagcacttgcaccggtaaaagcagcagcggatgaattcgttgtagagaaggtattggaatatgttcagggaatttcagaagttcgaagctataatctgacaggttgtgcatctaaagagctaaatgaagcaattgataagaacagggacattaatacaacaatggaacttaagacggttccatggatgcaattgcagtccattatattgaagcttatgggtgtggctataattttgacctcatgtggattttaccttgcgggcagtatgacattacagaattgtattggcatgattatctgttcttttttggtatttgaaagtcttggttcagcaggcaattactcgacacttctcaggattgtggatttaagtgtttcaaaagtggaaaatgtcatgagaataaaagaaatggatactgatgggaaaaatattattccgaaaaactttgatattgaagttgaaaatgtagacttctattatgacgagaatcacgcagaagacgcaaagattattaatcatttatcagtacacattccggaaagaacaaccacggccattgttggaccttctggtggcgggaagacaacgttgtgtcatctgatttcaagattttgggacgtaagcaatggaaatatcagtcttggtggagaaaatgtaaggaactacagtgtggatagcttgatgaaaaactttagtttcgtatttcagaatgtctatctgttcgaggacaccattgcaaataatattcgttttgggcaacctgaagcgtcaatgaaactcgttatggatgctgctaagaaggcatgctgccatgattttattatggagctgccaaatggttatgataccgtaatcggggagggaggaaccagtctttctggtggtgaaaaacagcgtatatctattgcacgagctattatgaaggacgcacctgtgattattttggatgaagcaacagctaatgtagacccggaaaatgagaaggaactaatgtctgctatagaagctcttacaaaagaaaagacgattattatgattgcgcatagacttaaaacggtagaacatgcagatcagattctggtattagataaggggcagattgttcagcagggaagacatagtgaactcttgaaacagactgggatttatcgtaaatttattcttgagagagaagaggcagtaggctggaaaatatagagaaaagttcttaattcgtacaaatgtattaaagaaaatcaaaacaataatgtaaccattgaaattacatctgatttttgatatgattactaccaaagagaggtgtttacaatgcagatttcaagcagatttacaatggcaattcatatgtttgcctgtatagatacattttcagaccagaagatgacaagtgattttatggctgcaagtattggaaccaatccggttattatccgtaaaatattgcaacaactaaaagctgccggtcttattgaagttgcaagaggaactggcggagtgacaattaccagaccacttgaacagattacatttcttgatgtgtataaggcagtagaatgtgcaccggatgaacaattgtttcattttcatgagaatccaaatcagaaatgtccggtaggaaagaatattcatcatgttcttgataagagacttttagaggtgcaaagggcaatggaggagaagctttcagaaatgacgcttgcggatgtgaaaaaagagattgcagcatatacataaaaaagttacaaaagttttgatgtaactattgacattacaacaagtcagtgttatagtacaactacaagatgtaacaaacaaagttacaacaaattaaggaggtactataaaatgcagaaagtagtagaatttttacagaaaaacccggttcagtatttagcaacagtaggaagagatggaaaagcaaaatgccgtccattcatgttctgttttgagcaggacggaaagctttggttctgtaccaacaacacaaaggaagtctacaaagatatgcaggaaaatcctgaggtagaggtttccgtatcttctccggaatatgcttggattcgtcttcatggaaaagcagtatttgagaacaacatgagcgtaaaggaaggctgcatgaataaccctatcgttaaggggcagtatcagaccacagataatcctatttttgaggtgttctatcttgaaaaccctcatggtgtgattgctgatttttctggaaatccaccttatgaattctagtacaactgttttaaattcaggcatatctcgcaaaaggagagaatttgaaatgacaaaaatggactatctcaaacttctggtggacgaaatccactcaaccacagttgcaacaataggttcagacggacaccctcagacaagaatcatagatatgatgtactatgatgaagaaggtgtgtattttcttacagtaaagggcaaagcattttatgaccagttaatggaacagcagtatgtggcaatatctgcgacaaaagaaaaaatagcagtgtctcttcgtggaagaataaagaacatcgggaaaaagaatcttgatattatgtttgagagaaatccttatatgaagaaaatttaccccggagatacaaaagacgcaatcgaagtgtttcagctgtatgaggcacagggcgagtattttgatatcagcaatccgtcaaacattgtgaggaatacaataacaataggaaaagcagaagctgtccagactggttattttgttgggaaagactgtatcggatgtaagttgtgttattctgtatgtccgcaaaagtgtattgatatatcttcagttccggttacaatcaatcagaatcattgcctgcattgcggaagatgtgcagagatttgcccgaaacagtgtattgagaaaagaggttaattatgatctttaagaaaatcagaaaaggacatgttgactggcgaaattttttatgtggtactcctgcaaatgattatatatttcaaaaggatacatatgaatataggattgacagggcggtagaatatataagaaatgccgattgcatactgattggagcgggagctggtgcatcaacagctgccggaataagtatgggtggtaaaagatttacagataattttgcggaatttatagaaaaatatggcagtcgctacatgacagatatgtatgctgcaggtttttatcctttcccaacggaagaggcaaagtggggttattggtctaaagcagctttgcttaaccggtttgatctgcctgcattaccactttataaagaactttatgatattgtaaaaagaaaagaatattttgtactgactactaatgtggaccatcagttttacaaagcgggatttgatgaaaacagaatatttgcaacgcagggagattatggaaaaatacagtgtcagaaagcctgtcatccaaagacctacgatgcacaagaagtgtttagaaagatggatgaagcaaggaaagaatgcctgattccatcagaacttgtgccgaaatgccctgtatgtggaggcagaatggagatgaatctccgttgtgataactattttgtggaagatgaagcatggcatgaggcagctgacaggtatgcggattttctgaaacaaaataggaataaaaaagttgttcttctggaacttggagttggatttaacaccccgattattatacgatttccttttgaaaaaatggtgcgggagaatagctcttacagtctgatacgtctgaatatggatgaggcagtggttccggaaagcttcggaaaacgtgcaatcggtattgagggtgacatggaaagagcaattacagatataagggggcaggtattatgacacaggacgaacgaagagaatatctgattcagtatcttttaaaagaagaagtaaggtttgtcagacagagtattcccactgataagcaggggcaggagaatctgctccgctcacttatgaatatcagaccgccaagaccggtcagcggagaatttttaaaaatacaggacgaatatcttacggaaagaaatagggagcgtggaatcacagatattgacacgcttgcacctgtaaaatccgattcgagattatatatctggcagggcgatattaccactttgaaatgtgacgcaatcgtaaatgcgtgcaattcacagatgcttggttgcttttcgccaatgcatgcctgcattgataattttatccatacttatgcaggagttgaactgcgtttgaaaatgcatgagattatgacaaagcagggacatgaagaggaaactggaaaagcaaagattacatcaggatataaccttccggcaaaatatattcttcatacagtaggtccaattatacagtggaaagttacaaaaaaagatgaagaactgctcgcaagctgttacagagagtgtctaagacttgctgctgatacaggtgcagaatcaattgcattttgttgtttgtctacaggagtattccgttttccgcagcaacgggctgccgagattgcgacgaacactgtaaagcagtatcttgacaaagacagcagaatcaaaaaggtaatctttaatgtgtttaaggatgaagatttaaaaatatataatggtttgctataagtgtctgttgaaaacatcatttgttacaaaacatcatttattaagccgtgtcctttttatatgttgtatcacgttttaatcagtgctacaataaagaaaacctgaattttgcagagatatgtcaaagcattttgacacgcattttctgtgatgtcaaagccgtttgatagactatgaagggtggttttcctataataaagtacaagggagcagtgacatggagtatgatatcggaagtaaaataaaggcagccagacttaaaaaaaagatgacacaagaacaggttgctgaattattgggagtgagtcgtcagaccatctcaaattgggaaaatgaaaaatcctatccagatatcatcagtgtcattaaaatgagtgattactacgaggcttcccttgactatttattgaagggagaacaaaaaatgaatacatattatgattatctcgaagaaagtacaaatgttgtaagaagcaacaccaatagaaataaaatcatcactatgctgtcctatctgctgatttgggcagttgccatgattgtattttggttctttacaagtggaagtgatgctatgggctatagtttaatgttcctttggattattcttcctataacgacatttgtggtatccattattattggtaaaaatgatttttggggaaaagggaaatgggcaattacccttttctttggagtaatgtatatgcttgctgaatacggaacattcaaaatggcaaacaacattactttcgacaagctgaatgccccagcttggggaatggttgtagctggtacgataatctctacaatcggtatgctggtaggttcattatttaacaagcagatgaataaataaactcccagcttgtcgagctggaagttgtcaaactgaaatgtaaatggagggttatgtaaatgaaaaaaattggaatagttttacttatacttatttcccttataggtacattgttaggatgcggaaaacaagatgtgaataaggacttggagagcattgaggcgtcggaaatcaaacaaatagaacatacaggaactacaggcgggaaagacggtaattattcgtattctttttcagatgatgaagttatcgagtttataaatttgttgaatcaagtaaaacttggtgacgaagtagacgaaaacaaagcattatcaagtggtgctgtttcttattatactatccatcttgcgacagatgaaacgctgacaattagtccaggtaaatattttaaagttgcagacagatattatgagtttgataattatgatgaattgtgggatgaatttatagtatttaacagtataaagtaaacttcggaaaatttctatcctgatatggcaaattcagatgcctatcttattggaaaagcgaaatataaggatcatgacgaaaagaaatcaggacaatatgaagagttatttgggaaagggttgaaagagattgattttgaaactgtaagcaatgtggcagttcatgaaattcggcaaataattcaacaaataattcaacaaattattttattcatgagatgaaaatgaataatgattatcagataaaagggcgatgtagtttatatacatcgctctttttgattggcatggatatttatttttctagcagcttgcgtgcatatgtaagtattctgccttctacattgctgtcctgtttgataatattgatgagggaataaagctcagggtcattggatgaagaaacaataatgtaatcaggatctgtcttatcagatgttccgtaaagaaaatctatgttgcaattaaatgtctgcgcaatgaaaccgactgtgggataagagggttcacgttgtccattttcatagcggccatataccattggcgagatattaaggcggcgtgcggcttctgctttatttatatttagagtatttctgagttggattaatctttcaggttgaaatttcataggtaagctccttcttaaaaatcgatattcaagtgcttgaatgtaatcataaaagattataaattataatttagcttttttcaatgtttacgttgacattaaccattggatatgataatatttcaataaccaatggttacacatatggatgaatagaggggaataaaatgaaacattatattgagattcaaagactaaggacacaagacgtggtcgttgatgatacgttgacacttgaaaaaaacacggatgcatttatacagggagatataatcagtatcactgagaaaatagatggtgccaattcaagtatatattatgataaaaagctggatagactgagatgttttagcagtaaaaatgaacttgatttcagcaaccagttgagaggttttttgacttatgttcagagtctggatagggagccgtttattaaatatccgaattatatattttttggagagtggcttgtgagccatacggtcatttatgatgattccaattataacaaatggtatttatttagtgtgtatgatacagtttcaggcagatggctgtcacaggattttgtcaaaaaatttgcagaaaaaaatgatttttgttatccgcatgaattatactatggaccatttattagttggaaccattgtctcagctttgccaatgccccggcatatggcacgcagcaagagggaatcgtcataaagaatcagactgcactggagcaggagagaggtccgcatatattaaaatatgtaaatccggagttcaaggaaacgcagaagaagaatcataaaaagaaacttgaagatccgaataaattgaacgaaaaagcagaggcagaagagtatatacgcatgattgtaacagatgcaagggttatgaagtgctatcataagcttgttgataatggaattttaccggagaaatttgaattgaaacatatgaagcatgttgcacaaaatctaccaaaggctgtgtatgaggattgcgtgaaggaagaattggagattttaaagaaagccggtgagtttggaggcaaactttgcagtaaggtgacaatggaaattattaaagataaattgaagataggttgacttttttggctggaattgttaggatataaatgaaagtttaccactgaccgatatgtggtatataaatggtcgggttgaaannnnnnnnnnnnnnnnnnnnnnnnnnnnnnnnnnnnnnnnnnnnnnnnnnnnnnnnnnnnnnnnnnnnnnnnnnnnnnnnnnnnnnnnnnnnnnnnnnnnnnnnnnnnnnnnnnnnnnnnnnnnnnnnnnnnnnnnnnnnnnnnnnnnnnnntttgtggagattaacaaatgataaggaatgggttttatattatcaaagatagctttttttcggatatgtcggatccatatttgaaaggaaataaaaaacaaaatagaccacattactattgttttaaagatagcaattataatggaatatattggatgattccactttcaagtcggattgataagtataagaaaatagtaagtaaaagaaccggtaaaggaagaacctgtgatataattcacattgtgaaacttgatgataatcatgaaagcgcttttctgatacaggatatgtttccaatttcagaaaaatatatagaacgggaatacactatagcaggtaatcatcttcgtttaaccagtgaacatgctgcaaaagaaattgaacaaaaagcaagaaaagttttgggaatgctgaagagaggaataaaatttactccaacccaaccagatatacagaaaatatatgagaggctgcaacaggacttaccagcaacacatttgtaattttataataatccggggggattttcactgtttccatctataatccccaaaatggtttaataacgtttgctaacaatacctattgtaaataaaagctatcatcattacaatagagattagtaatgcttcgaacaatatgaaaggcataaaaccaatatgaatagacacacaaacataataatcacagccgtggcatcgctgcttatcgtcacacttgcgggcagagaattcattaaaaatcataagaaagagtctaatgataaatcgtctacgaatgtatcagaaaatacatgtgaagatatacccgacacaagtatatctgatacgtgtgtagccgatacaaatacacctgacacgagtacatctgaagcagatattctggattcgacctatgagaataataaagagcaattttatatatccgaaattccggatgatatttttgaaaaaatgcagggcaaatcctacaaggcagattgtacactccccagagaaaatctgcgatatatacatgtactacacgtaggctttgaccatcaggtacatgaaggtgagctggttgtaaataaagatatcgcagatgatgtacttgaaatatttaaggagctctatgagtccggatatcaaatagaaaaagtcagacttgttgatgaatacgatgcagatgatgaggcatctatgagcgacaataattcatcggccttcaatttcagatttatttcccacaccacgaagatatctaagcatggaatgggaatggcggtggatatcaacactctttacaatccttatgtcaaaacagtcgatgggaagctttcgattgagcctgcaaatgccgcagattatgttgaccggagcagggatttttcacacaagattgaccatgacgatttatgctataagctgtttacggagcatggctttgagtggggaggcgattggacgcattccaaggattatcagcactttgaaaaatagtgctgataatttctacggaagcaggtgacctgcagccaggtacagctcataccattcctcgcgagtcagagtaatatcgcatgctgcgataatttccttcaggcggctttcgcttgaagttccggtaacaatctgcatatttgccggatggcgtaaaatccatgcggccgcaatagtagtatcgctgacattatatttttcggctatcacatgaagttttttattcagttcagggtattcgtcgcttccgagaaaacagcctttccatgccggcatctgaaacggagaccatgcctggagagtgatgttgtggaggcggcagtagtcgagcagacttccgtcgtgatcaattgaaccgggtgtttccatattgacttccataccatttgcaacgagattggaaacaggaatgctgaactgaacctgattgacaacgagtggttggcgtacatacttctgtagcagttcaatctgcatcggcttatggtttgaaacaccaaaatggcgaacctttccgctttcaaaaagaacatcaaatgcagcggcaacctcttccggttctacgagtgcatccggacgatgaagcagcagaagatcaagataatctgtatgaagcctttttaaaataccatcgacagatttcagaatatgctcctttgagagatcatagaagccttggcggatgccacattttgactgcaggtaaatatcttcacgctttagggctggatcgtctgcaaacgcttcgccgaatacgctctcgctcataccgccaccgtagatatccgcgtgatcaaagaaatatgcgccctgttccagcgcagcatgaataaaatgattcatctcatcctttgatttttcagaaaggcgcatgcatccaactgcaactgaaggaacctttcgtatgtgattgcctaaaattgtttctctcatagtaaaaatctcctttgtaattattttctaattcccataatgagtgcggcgtagccccaatcccatatgagctttgcaaagctgttttcaagatattcgcgtatgtcatcatcatcatatcctgtcatgcgtgagatgatgacaatatgctctctgatggtttcatatgtcaacggactattggcattgtgactgtaccacaagaaaagactttgacgtatagcagtgtattcaatcataatccactgcattttgataatcatgtgttcaataatttttttagtggatgctgcttcaggcgatatcaggtcggaaaacagctcgtttgccagataattgcgaaaaacaatgtcataatctgtgagtattgagccaaattgtttctgcgatgtttgcaaggtgcggctcatggagttattgtctgactgtgaataaatattggagtatctacaagcctcggtcagtacaggctgaagaaaggctgtgtataaaccctctttacgataatttactgataaatcctgaagcagctcattgcattcgataaatgtatcttcggccgggatatggatatcttccatggcggtattcagttcattaagcgtatgtccggaaaaatattcctgtatatgtgcattggtgattggctggtttttatataattccaataaaatgtaaagcccgttaagcaaagcctgctccactgaaagcccttggtcagatatcagtttaatcagattatcacggattgaaaatgccgtagataaattattccgggtctcggatattacaggaaatgtgacaggtttttcgcaccacaggtcgataacggccggacagcacggcatgagtgttcgttcctcatgtcttgaaaaccggtggatttctctgggaaacagtgcacatgtctctgaaagcacttcatctgagtatgtcattacaagatgacatagcttatcctttgaaagaaacggacaccgatgtttttcgtccagtttaataaccagcctgccatccttatggcatgtgtatgagcttagattgtcacttttttcagacactttatcagcagaaaaatgggcagcagataaagtatccggaggagaaagcttcttccatttgcggtttgtagcgtcatctactgcaattttccactcctgacagcatgtgatactgcatttgtcagcaatacatttgaatttgttgtaatagtccggttgatagtttttcatgtttttcctttacttatacagatttgtgaatagagcatagtatagcttgttattatcaatcaatcacatgatgattcagccattttcttgagtggaatctggcagtaaatataatagaacgaagcatccagtcacaagccatgccaatccacactgcaatcggaccaaagccccatacacgacagaggtatatgcacagacttacacggcaaagccacattgtgcagcaggatacaatcatggagaatttcacatcgcctgcggcacgcagtccatatggcgggatgaaggatggtacccagcagattggcttggcaattgtgataaaggtaatcatctcaaagcagagccgtgcactggcaggttccattccggcaagcattgtaatgggctttgtgagtatgaaaataatcagacagctggcaatgattacaacctcagacaccagtgacagttttttgatatagtagacagcttcatcctttctgccggcacccagacactgtcctacaacagtcataagacctattcctattccgatagcggcaataccatttaagttttcgaggatattggtcatggcctgggcagcgatagccacggttccaagagtggatacagtagactggatagccagctttccaaactggaacatgctgttttcgattcctgaggggataccgatgagcaggatttttttaatcaggccccattcagggcgtatagacatatagttctttatgaaaatcggttcattttcccttcgaagctgtatgataacgacaatcgcgcagaatattcgggatacgagagtggaaatagcagctccctcaacacccataccgaagccgaaaatcagaatagcgttgccgccgatattcataaagtttgaaataacagatatgaccataggattgcgactgttattctgtgcgcgcataatggatgcgccggcatcatagagacctataaaaggaaatgacagcaatgtaaaaaagaaataaacctgtgagttcctcattacatcagcttcaacagcgccaaatatggcacgaagcagcgactttcttgttatcagacaaaaagcagataaaagtacagacagaaatgccatgacaaaaaatacctgtcttgcagcatggcgggcaccttttgtattgtgacttcccagatactgcgaacagagaatcgcaccaccggcggcaagcgctgaaagtgcctgtatgacaaggatattgattgagtctacaagcgagaccgctgagatagcggcagaacctacattgctgaccatcattgtatccacagttcccataagagaggccaatagctgctctattattatcggaaccaaaagctttcgaagtttagtatttgtataaatatgattggttgtagtatgcaggtttgctgtttttattttatctgaatgtaaatttttcatatctgattacctttataactatatgattaaagggtcaaaaggtatcatcgatgcattcttgcatgcaattcgatgtataccttatatattttacgtgtttaggttagtacgataaattcgtaatgtcaataaggaatatttaaagtgctggcaaagtgtttgtaataaaattatttaaaatgtcagtaacttctgtttttttgaacaatattgcacaatcctcttttattttgaaccaaaaagttatacaatagtaccatagtaaaaggcatcaaaactaattcccaaattaaatcacgagaggtatcaacatgaaaaaagcaaagaaaccacctctgtacaaaagcttcggctatgccttcgagggcatatttacatgcatcagaaatgagcgcaatatcaagatacactgtactgtcgcgatacttgtagtgatagcaggagcggtacttgggataacaccgactgagtggtgcatctgcctgacgctgtttggattggtgatagccctggagctggtcaacactgcgattgagtcagttgtagatttggtaacgacagagcgaaagccgcttgccaaggtagctaaggacacggcagcaggagcagtgcttgtggcagcaataatggctgcgatagttggacttatcatttttatgccaaggattgcttctctattatgatgattaaagggtcaaaaggtatcatcaatatgagcagcgaatatttttgatgttctttataaggagcttattcggagcaatcaattttaaataacaggaaacggaggattttaccatggaaagacttacagacggattaaagaagattttacttgcaggaataggaacagtggcagtgactgctgagaaatcaaaggaagtgctcgatgagatggtcaagagaggtgagctgactgtcgagcagggcaaggtactcaatcaggagcttaagcacaatatcaaggacacagtaaagaaaaatgtaaatgtatctgttaagccacagtcaccggaggagctcgaggagcttttggacaagatgacacctgaacagatacaggctttaaagagcaagcttgcacagatggatgaggctgacgtggatcaagaagctgatgaaagcgttttcgaggatgaggacattgtaacagatacttcagccgatggaaaaagtgcttccggtggagaatcacagacagtggatataaaaatagaagctgaggacgataaagaggaaagcgtgaactagtatggatagccgcctgaaggagatgacagcggtacttaagaagtacaagctcacgcatggacttacacccgaaaaattcagacttatattgcaggagctgggacctacctatattaagcttggacagataatgtcgcttcactcggatattctgccaaaggaatattgtgaggagcttatgaagctatgctcagatgtggagcctatgccgtttgagcaggtggaggctgtcatagatgcttcatttggctattcatggaaggatgtctttgcttcaatagataaaaagcctcttggggcagcttctatagcgcaggtgcacagggccacacttaaaaccggtgagcaggtggttgtgaaggtgcaaaggaagggcattcacgaggtgatgtcaaaggacatggcgctgcttcacaaggcggttaagcttgtgccgcccatctctataaagggcattgtggattttgatatggtgcttgatgagatgtgggcggtggcacaggaggagatgaatttcctgcttgaggcatccaatattgaggagtttgccagcaataacagggatgttgcatttgtagccacaccaaagctttaccgcaagtataccacatcacatgtacttgtcatggagtatataaagggctttaatatcgatgacaaggaggggcttttaaaggatggctatgatcttgaggagataggcagcaagctgattgacaactatatcaggcaggtgatagaggatggcttcttccatgcggacccgcatccgggcaatgtaaagataaggaatggcaaaattgtctggattgatatgggcatgatgggaaggctttctgaacatgacaaaaaggaactgagcaatgctgtttacggcatcgccatgaacgatatcggcatgatagaggatgcggtgcttgcaattggtgactttaggggtgagcctgacagggcaaagctgtacaaggatatcaagataatcataaataaatacggcagtctggatatgggacaggtagatgtcgcagagtttattcaggagcttttggaggtaatgaagaacaaccgcattgttatgccgcacggttttacaatgcttgcgaggggcatcactcagatagagggagtgcttgcggatattgcaccggacatcaacatggttggtattgcttctgcaaggataaagcaggagatgtttaagaattttgatttgaagggcgagcttaaaaaagccgggaagacagcatacaaatcagctcaccgcatggcagaactgccggagagaatggcgcagatactcgaggaatatcaaagagggcagacacgcataaatcttgacatgcatgcttctgatgagcttgcgaggcttttacacaggctggtgagaaatatcgtcatgggcttatgggttatggcacttctaatcagctcaagcatagtgtgtaccacagatatgacacctaagatacttggcataccggcgcttggtgtgatgggatatgtgtttgcatgcatcatagtgctttatacgattgtgaagcatttcatatccagacgatgataaaaaagcaggattctgaaattaatcagaaatcctgctttttaattacgttatattatttcgatgattttttactctttgcttttttataatcctcatcaagatgatatttgtcctgatacatggtgaactgacctacaaatgcaggctcctgtccggccttaagctcattgagataatcatgtgtctcgaatgatgagttgtgtgtctggatcaggcatacagcaatgtttgagcagtgatccgaagctctctcacagtttgtgatgtaatctgtgaggaatacgccgagtctgctgtcacatttgcccttctgaagacgctcaatatgatgatttctaatctcctttgtgagatcgtcaataacctgctcaagaggctcaaccttgattgcctctgtcaaatcgtttttgctaaatgcctctacagtgagagtgagaatctcgcgcagagcattattgagcaccgtgagctcttttcttgcgttctttgaaaattcaagattgttgtcatcaatctgcttggcaagctttgccatatttatcgcatgatctccgattctctcgaagtcattgattgcatgaagcatctttgaaatctcgttgttgccgtcctcagaaacatcctttccggataagtgaatgaggaaggtgtcaagctgatcctctaagtaatcaagtcgctcttccatgacttcaatatcatcaaactttgaatctgagtaattgtcaaagaggtctaaagcattcttgaagctgtctcttgcaagctcagccatctcgtttgtcttctcaagacattctttgacagcaagtccaggtgagagtaaaagtctctcgtcgagtacaacctgtccgtctgcgttgtcagttgtgacaagcttcttagcaatctttacaagagtattgctaaacggaagaaggataatagtggtagcaatattgaagattgagtggaataccgcaatcattacaggagagatgctgtcattaaataatgccagatcaacagcataacgtgcgatacagtatactacaagtccaattgctgtaccaaacagattgaagctgatgtggatgatggatactctcttggcgtttttgtttacgccgattgacgaaagcagtgcagtcacgcatgtaccgatgttctgacccatgatgatcgggatagccatgctatatgagatagcgcctgtcatggctaaagcctgcagcacaccaactgatgcggcagatgactggatgactccggtaaatacagcacctacaagcactccgaggaatggattgttaaaggtggtgagcagtccggtaaattcaggcatatctgcgagtggtgatacagcgccgctcatgagctgcataccatacatgagtacggcaaaacctgccatgatgattccaacgtccttgcgcttttccttcttgcttcccataatcataatcacaccgataagcgcgatgacaggggagaagttctcaggctttaacatcgagatgaacagattgtcactttcgatacctgaaagactaagaatccatgcggtgagagtggttccgatgttggaacccatgatgacaccaacagtctgggcaagctccatgatgccggagtttacgagtccgacaagcataacagtaagtgcggatgaggattggattgcaatagtgactattgctccaaaaaacaagctcttgatagggtttgaggttacctccttaagtatcttttggagattgcctcctgcgagcttctcaagactgcctgacataacatgcattccgaaaaggaaaaaggcaagtccgccgcataactgcaatatagagtaaatgttcatgtttacctccgtttgtaaaaataatttgttttactatttgctccagttatacatatttagtttacacaaaacacatataacataacataatttttacattctatcaatataatctgaaattttaataaaaaaagtgacattcacttttgaacacttttgaaaacgttttaaaatttatgtatatttatgttttcttttgtttacttttgaagaaaaacgttgtacaattacagtataataattttaggtaattattcagaaatttacattacaaggtggaggtatattatgtcagacgtaaaaagtgttattgaaagcggcaaggctgtgctcggaatagagttcggttctaccagaataaaggcggtgcttatcggggatgaccatgctcctatagccacaggtgcccatgattgggaaaacatgcttgtggacggcatctggacatacagcctggatatgatttgggagggcatttcagactgctacagcaaaatggcgcaggatgcaaaggaaaagtatggagttaccatcaaaaagcttgcggcaatcggtatttccggcatgatgcacggctatctgccttttgacaaggaggataatttgcttgtgccatttcggacatggagaaataccatcacaggtgaggctgcagcagagcttactgaggtgcttggctttaatattccgcagaggtggagcatagcgcatctgtatcaggctatattaaataaagaagagcatgtatcaaagatatcatatttcacaacattagcaggctatattcactggcagctcacaggtgaaaaggtcataggtgtcggcgaggcatcaggcatgtttcctatcgattctaagaccagggattatgatgcggcaatgcttgataaatttgcagcattagataaggtaaaagaatatccgtgggatataagagacattctgccaaaggtgcttacggctggagaaaaggcaggtacgctgacagaggaaggagctaaaaggcttgatgtaagcggcaatctggagagcggtatattgcttgcaccgccggagggagacgcaggcacgggaatggtcgcaaccaattctgttgcagtgcgtaccggaaatgtatcagcgggcacatctgtatttgctatggttgtgcttgaaaaggcacttaaggcagttcatgaggagcttgatatggtcaccacaccatcgggagatgcggtagctatggtgcactgcaataactgtacgtcagacttaaatgcatgggtgggattattcaaggaattttcagagctgtttggcatggatatagatatgaatgacatatatggaaagctctacaacaatgcacttacagccgataaggactgtggcggccttgtagcctttaatcttttctcgggagagcctgtcatcggactcaacgagggcagacctatgtttgccagaaagccggatgcaaggatgaatcttgcaaactttatgcgcacacatctctatgcaagtcttgcaacactaaaaatcggctgtgatattctctttaaagaggaaaaagtaaaggtagacacactttacggtcatggtggtctgttcaagacaaagggtgtgggccagagcatacttgcagcagccatggatgcaccggttgcggtcatggaaacagccggagagggcggcccgtggggcatggcagtgctcgcagcttatatggtgaataaagcagatggagagcctttggaaaaatatctttcagacagggtatttaatggtgaaaagggcatagtaatgcagccggaccctgatgatgtaaagggctttgatgagtacataaatacatataaggcagcaattgaggcagagcgtgcaatggtaaaggctcttccgctgtaatagcagaaaaaaataataagagaggaacagaaaatgcttgaagaattaaagaaacaggtttacgaagcaaacatggagctcccaagaagagggcttatcacatatacatggggcaatgtcagtggaattgacagggaaacaggctattttgtcatcaagccaagtggagtggattatgatgtgctcactcctgatgatatggtagtcatggatcttgaaggaaataagatagagggaaaatacaagccttcgtcagacactgcaacacacttagagctctacaaaaagtatccggatatcggaggaattgtacacacacactcacctgaggcagttgcatgggcacaggccggcagggatattccgctctacggcaccactcacgcagactatttcctaggctcaattccatgtgcgagaaatctcaccacagaggaaatcaacgaagcctatgagaaaaacacgggccttgtcatcatagagacctttgagaacagaaaaatcaatcctgtatacacaccggctgtgctctgtcagaatcacggaccgtttgcttggggaaaggatgcggctgaggctgtgcacaacgccgttgtccttgaagaagtggcaaagatggccagactcacagagtcagtaaatcctgacgtgaagccagccccggacaacataaaggagaagcatttctaccgtaagcatggggctaacgcatactatggacagaactgatttgtagctgttgtatgtggcctaatgcccattacgaagtaaataaattcacaacttaagggccgtaagccaccgctttgtggggcttacggcccgtagtattcatattattttgtgtttacatagcacaaaaaatgtgctaaatttttatgtaaagtacagtctcaaatgactgtaaataagacataaggtggttgatagaatggtactggcagttgagataatagtctgctgcttaatatttggcatatacagagtaatacggataaagcgggatccggcatataagataagcaatatgcccgagaaactgcagaaaaaggtcatgcatatgcgtggatacagaaatcggaatatccgtatcatgacagactgggagaagtttgtaaagaagcttccggcacttatattctggacgatagcgcttgtcatactgacatcaatagcaggggcaacaagcttttcaacgggctttgtgtttgcacttttgatatggatggcagtcctattgtttcttgaactggtagtatactgtggctggtatgcacatacaccgaaagtgtggataaagggtaccgaggatatggcgaaaaagacatataccaattatgcacattatatcgggctgataccacagagagctttgatggggatagttgttgcaatcatagttgggcttgtgatagacgtgatacccagacttgacaacagtaattattcgccgaaatatacagagatagaggatacattacaggcggcctgcgacaattacaggattccgggcatggctgttgaggtggtagatgcagagggcgtgcttttctcaggtacatatggggattgcaagagtcttgacacaccgtttatcaccggttcactcagcaagtcgtttactgcggcatgcatcatgaagctgtatgagggaggatatctgaatattgacagtccggtaaattcttatctggatgcagctgaggtattcaaaaatccaaaggatgcgactaagattacgataagacagctgctcaatcacaccagcggacttggcgtgtaccagcatgtgggaaatgcaaagattgttggcaaaaatggagaatatacatatgcgaatgtaaattatgacatacttggtcttatagtggaaaaagtatcaggtgttagttacagcgaatatctgacagcgacattttttacaccacttggcatgactcacagcagcgcagcctatgcaaaagcgaaggaggatggtctgattacaggccacaacaattatttcggtttttcggtggaaagcgatgtgaagtatccgctcagcgattcatggtccactgtaccggcgggctatattgcatccagcgcaaatgatatgggaaaatatctgcagatgtatctgcgtggcggctatggaatactctctgacaagagccttagcacaatgtttcgggtaacagttcctatggatgagtccggtgagacaggctatggtatgggctgggtacgttcggataaatatgtcgagacagtgtacaatcacacaggtctcactgagaactatatcgcagacatgtatctgcttccggagagcggtgtgggcgttgtattcctcgctaataccaatgactatatggttacaaaccatctgatgaacaaggtaacctcaaaggttgtgatgacacttatgggatacgcaacagacgagcttgaccccaaggattatgtcgatgcgcacctgttctatgaccttgtttttgcggcatttatatcggttgcgctgatggagattatcaagtcgcacaaatggagaacagacaatagcggaaacctgatagcgaatatttttctgcatctgtttttgccggtgggcatagttattgcgcctattgtcggaggtataccatactgggtaataaaggactatgttcctgatttatttattgtggcatgcctgagtgtagtacttcttgcaataggtggaatcttgaagcttaaaaacaggagaaattcataagataaaagcagaagaaatagaaatgcggctactgtaatatgtagccgcataattttttgaccatagcatcgtgggaggagtcacagcacactccgacagtacatgaagagtataagccggaggctttgacaaattcattgtcatctgctgaaagcctgataccacaaggatattccttaccatctattgtcatatatacaagcctgtccttatatttttcaatgatggttttatccagatatttgcttatatcttcaaagcagacatttttggcgtaataatcaaaggtcttatcatccataaagcatatatcgtattcgttagaagcaaagtatgctgtgagggctgccatgttctgatagtctaagccatttttgtctacattgacacggatatttttatttaagacaatttcatcctctgacaaatcatagccgttatctgtgagaaagtcattgaaaatatcggcgccgttgtcctctgtggtgctgttttctacatttacgcataatacgctcaaaacagtatttttctgcgcaagtcggccgtgaataaaggatgtgactgctatgattccgataatgacaagaaatatcggtattttgtaatagtcccatatatattgtattttctgactgaatgtcagctccttaaaaggtgtcttttgttccatgattttatctccttctgatatgatgtgctgtagtttaagaatattataaggtaatttatagaaatttaccaataaacattctattaactgcctttttctttttagattattatgctataatgagccaaaacacagataatacaaaaggagaataatatgaaagcaagccacagaaaagatgttataatcgccagactgatttttgcagcaatatgtctttttcttattgccctgattgctacaatagtgattaccgttacctcaaagggcggcaaaaaaaaggagcaggacaaggtacaacagaatgcagttagcgaaagtgaaactgacagtgccggcgatagtgatacagagataggcgccatatatctgccacagcagactacagagggtaccgaaaaaacttacgtcaccactacaagcagtgtaaacatgagagagaagcctgataaaaacgcaaatataattaatgttataggaccggatgtgaagattgagtttgtatcagaggacaatggctggacacaggttatcttccagggccagacaggctatgtcagctctgactacgtcaagtcagatatggcagacagcactacagacagcggcacatcaggagatgcagatagtgctgcacagtcacagtaatagatacatggtgaggtaatgtatatgacaggaattatatgggcatgtgctgcaacgtttattgcagcatgtgtgcctattttggccaaggttggaactaaaaagacagacccggcgctggcgggaagcattgccgggattgttttatgtgcgtctatatttttttacaggaaagataatataatgggaagcagcctgattgcactcggccaaaggagcgttatatttatacttctggcagggcttgcaacagggctttttggcatctgtttttttaaatccatatatgatggctacacatttcaggttacagctatagttaaatgcagctatataatcacgcttgcagcgggattttttctgtttcataacacccctgacacttttgattatatagcgattgcactcatgattgttggaacggttattttaaatttggatggaacaggtattttgtttgcgcttcttgctgcagtttgtgcatcggcagcgcatattctggtgtcacttggcgggatacagctggataagggctttattgcgttctggtgtgtatttataggaacgctggtgcttattatatttactattgcaacaggaggcatgaagaaaatcggatccatgtcatttgttgatggtatatgcctgattcttgcaggcattgcatacccgttagcatatgatttttatggcagggcagtttcaatgcccggcagctatgcagggtatatttttaatttgacgattattgtgatgatgatatgctccagcgtgatactgaaggagaagatatcgggaaagaaattcctgggagcatgcatttttattgcagcattgtttgttatagcatgcaactaatagctgaatatagcatataatgattaaaaagaggttttttgatgttacctttttataaaacatttccgtttatggattactataaaaatgaggaggcatttgcaaaggacctgaggatgataaaggatatgtatccgcttgatacggcgatgatacagtccgcagtagagcagcgcatggatgagctggagtatgagggcagttttatctatgatgaggtgcctgacaggcagcgtcttttcgatgaggcagacaggattgccggcagatttatctcagagcaaagcagcaggtgctttatctgtacaatagcgggcatactttttaactgtgaactctgcagacgcagatgcagatacagaaggtaccaaagattctggtagatataaggatatgattttatgagtaagaaagtgataaagccgatagtacttatagtagtatttattgcagcattaattacattttgcataattacaaacaagggaaataaggatatgaccacgaagcaggcggatgcaacgctgccggttatgtcatttaatctggataaaataaagataaacaccctccatggatatactactgagatggatccgacaaagatgcgcgattgcgttattccaatttcggatgacaggaagctctcattatccatttcaacatatggcatggctgttgacaggatatcatacaagatcagaagcatggatggcaagaggctggtggccgatgacgagatatcttctttttctaataaggataatactattcaggcggacataagcatgccgaatgttatggatgaaaatactgagtatcttttggtgtttaccatcacaagcggtcaggataatgtatattattacagcaggattatgcagaccgatggaaaggcagctgcaaaggttgttgagtttgcaaagaagtttcatgatgagacgtttataaaggatgacaaatccttctttacaacatatatggagacaacaaccggtgacagaaatacgcttgcacatgtggatctgacatctacggtgagtcagattacctggggctcaatggccgctgcacagtatacgaatcctgtcatagccctaaaggaaataaacgattcttatgatgtggtcacaatagactatgtgatgagttgtgtggacggtaagggtgagactgagtattacaatgtaagagaatatttcaggctgcgccagacggaaagccgtatgtacgtgctcaactatgagagaacggcaaatcagatttttaatagtgaaaacagctttatatcggattcaggcagcgtaatgcttggcatcagaagcagtgaggcagagtacagggccaatgaagcaggcagtgtgatatgctttgtccaggagggagatttatactcctatgatatcaacaatggaatgataatcaaggtattcagcttcagggacgctgagggcattgatgagcgtgagaactggaatcatcacgatataaagattgtcagtgtagacgaagcgggcagtattgattttgtggtatacggatatatgaacagaggcacccacgagggagaggtgggagccggtgtgtaccattatgacggtctggcacatactatagatgaggaagcgtttattccttctaagacatcatatgaggtgctaaaggctgagatgggcaagatgctttatctcaatgagaagaatgaattctatctcatgatggatgacagtctctataggattaatttaggctcgatgtcagtaaagaaggtggttgagggcttgtctacaggctcttactgcgcatcggagagtaacagatactttgcatgggtggattctgcaaatcagtactcatcaaataccataaaagtgatggatttaaagaatggcaagacatttgagatcaaaaagggcaacgaccagtatctgcgtccgcttggtttcataggtgaggatttcatatatggacaggcgaatgttgctgatgtggtctctgatgcagccggaaacacaacatttccgatgaatggtcttattattcttgatacatctgaccagtcggagcttaagacatataccccttcgggcggctatgtcgagaaaatttctgtggatggatatacggtaacgatagatctgattgcacaaaataatggtgtgtatgcagaaatcggtcaggataccattatgaaccgggaggctgattcgaagcagaagatagctcttgatacgagccagtccgatacaaagctgacggtcagcgctattagtatagcaggtggtaaaaagccggataagctgaagcaactgacagcacagatgactataaattcgcatgatactgctgttgatttaaagtttgatgacaatacagtccatttctatgtttatgcaaagggggatgtgatttttgcatctgatgacatctcggatgccataaaacaggcaaatgacagcatgggagtggtaattgactcaaaccagcagtatgtatggatgagggcaagaaaaaatgcagtaaatgcatttgcgaatattgcatgtaatgaaaccgataaggatgctgacagtgtcgtgaagtcagtaagtgcaatgcttacttacaatgatgttacggtaagtgtgtctgagctgattggagcaggcagcagtgctgttgatgtactcaaaaacaacctgccggacaaggaaatcctggatttacaaggagtgtcttctgaggatattatcttttatatcagccagggcaatccggtatttgcgatgacgggaaatacgtcggcagtgcttgtaacaggatactcttcaaatggagctttatatatttataatccggataatggcgcaacaacatcgatgagctatgaggatgctgacagaatgttttataatggtggcttgcattttatcacgtacatgacaaaataaacagaataatgttgtaataatgctgattttgtgacattaaatgtaagctcattaggtaaagtttaacagaaattttcctaaggattgaaaagcggttacaattgggatatattaaataagtatgaaataggtttaatactttttgtttaaggagaacgtatgagtaagaagagtattgtcgttacaaaagtatgtgaaggtcatgacaatccaatcgcagagcttgttcaagtggcatgcaagttcgatagtgagattacattggagagtgacaatcgcaaaatcaatgcaaaaagcatcatgggtattatggcatttaatccttcagatggaatgactgttgatattgttacaaagggtgatgatgagcaggaagctttagttgcaattgaaaattttttagtatgtgaataatgagcatgaggaggaaaatagtatgcgtaaaaagaataactcaaagacagttaagcaggcagtaaagccggttgaagtaaaaaaagaggaaacagtggcacagccggtttcagagcctaaggctgatgcaaaagccgatgtaaaggctgaggtagaaaaagccgtagagaagacaaccgagaaggttgagaaggctgttgaaaagacaactgagaaggttgctgagaaggccgctgaggttaaggctgatgtaaaggacactgttaagaaaacaacagcaaaggcagcaaaagctgcaaagacagctaaagaggcaaaacctgcaaagaaggaaccggtaaagccggagattattgttcagtaccagaacagcgaggttgatacagctgctgtcgaggagcgtgttaaggctcagttcgttgctgagggacacaaggcaggattcatcagaaagcttaacatctacatcaagccggaggagtattctgcatactatgttataaatgataagttttcaggtcgtgtagatttattctaatcagacattattagggaatacatattttatctagcgcataataaaagccgatacatttcgtggagacacggtgtatcggcttttgttttatgtataggtatgtgtaaaagcagctgtatgacagtttaaatgcattatgaaatacttagtggacaaacaaaaaagggtaacaaaaaagcgggtgatgggaatcgaacccacgtatccagcttggaaggctggtgttctaccattgaactacacccgcatatgaatatttaatttgttgtataatgcccagttccggaatcgaaccagagacacacggattttcagtccgttgctctaccaactgagctaactgggcttgtctcacaacaaaagttattctacacgatttgtctgttgatgtcaatattaaaattgagaaaaattggatagttacaataaacgagaaatatagtattaaaaactatataaaatagaaaatgatataattttaccttgacatgaataccataaaggattactatgtgtatatgtttgattatcaaataatttgaatatcaaacagaaaaacggaatttatacatgttcggaggtacatattatgttgagagaactgagaatcggagatatggttgcaaagcttcctatcattcagggaggcatgggagttggagtgagtcttagcagactggccggagctgttgctaaggagggtggtgtaggagtgatttccaccgcgcagattggctttgaggagccggagtttgaaaaggaccaggcaaaggctaatctgatagctatcaagaagcatattaagaaagcaaaggagcttgcctgtggacatggaatggtaggtgtcaatatcatggtggctttaaagcattacaaggagcatgttctggctgcggttgaagcaggtgctgatgttattataagcggggcaggacttccaatggaactgcctgagctggtcgatgaaaagtcgcatacaaggattgctccgattgtttcttcaaagagagcagcaaatcttatacttaaaatgtgggcacacagatacaaccgcacagcggactttattgttatcgagggaccaaaggccggaggacatctgggattttccaatgagcagcttgcagatatggagcatatggattatgacagcgagattaaggagattatcagctgtgcaaagacatatgaggagaagtttaaaaagcacattccggtaattgtagcaggcggagtgtttacacatgaggatgtcatgcactgcatggagcttggagctgacggagtgcaggtggcgagccgttttgtggcgacagaggagtgtgacgcatctgatgcctataagcatgcttatctgaacgcgaatgagtctgatgtgcagattatacaaagcccggtcggaatgccggggcgagctgtcagaaatgggtttatcaggggattggaaaaggaaaagcagcctatcacaaagtgctacaattgtcttgagaaatgtaaccctgcaacagtgccatactgtattacgaaggcactgattgcagcggttaaaggagatatgcaaaacggtctggtattctgcggtgccaatgtgggccgcataaaccggatgactacggtccacgagcttatgagtgagcttgtgggagcataggcagtacatcctcacagtagcagcgaagcacttcacctacactccatgcctgcgcatagcaaccacggccgttgtgaggggcatcgccgtcaaatatctcgcatattgagccgatacagttgttgagcagatgctcccttacagggtcaagcagcttgtcagcgcataaagcggtctccttcgtgcggccgtttacctttacataggcactgataaaaccaccgagcagaaagccccaggctgttccctgatgataggcgtggtcgcgctttgagagagagccgatgtaaatcggatggtaatccttgtggtcaggatcaagagaacgcagtccgcagcctacgtacagcttatccgttaccgtatccacaattgctttttcacgctccttgtcaagcatggtaaatggcaggcttacggcataaatctggtttggacggattgtgtcgtcatcctcgtcaaccacatcatacaggcagcctgtgttttcattccagaagcgcttgttgaaggaagtctttacgagagaagcaagctgtctgtagctgtcatcgttatcgccaaacttagtctgaagcatatccatggtgcacagtgcgttgtaccaaagtgcatttatctcgacaggcttgccgtgacgaggcgtagcaacccagtcaccgacacgcacatccatccatgttacctggtcgagtccgcttccggcatgaatgagcccgtccgtgtccatatatatggaaaaatcagtgccttttttataagtagatatgatatcctttaagcatggataaatatccttctttataaattcataggcatcgggagtggccacatattcaagatatttgtagacagcataaaaataccacagtgatgcgtctacagtattgtagagaggctcaagtccgctgtccgggaacatattcgggatgagcccgtccttacagtacttggcaaaggtcagtagtatatcgtgggctttttcaaaacggccggtgcaaagtgtcaggccggtgtatgaaatcatagtgtcacggccccagtctgtaaaccaaggaagtccggcgagcacagtgtcatagcctgttgacagtctgtgtgcgatgaactggtttgcggccacagtaagcttcacggcaaagtcatcagtgaagccgcttcttttaatcagctcgtcggtgtagtcaagctgcgcacgtaatatttcaaaagcactttcgttatcagaaacaaggtgtttggcgaagacagtgcctgagttgtcattaccggcttcaagcggtacgatatcgcacattatagaaaaatgcattgattcaccggcaggaatatccacactcacgtcatatgggcaaaatgcacagtcgaggccgggcacttcattgtccacctcggtctgagcctcaagatcacagatatatttgttgtctctttcaataagctctccgcctgaaaaagcaatgcggatacagtggtcatcctgagcttttggaatgagggtgaagccatgctcctgcttttgaacctcgaattttaatgaatcgacggtggaactttcagagtgctcacggaagttcataagaggcgtgatcaaaagcttagccgcttcgcctttgttttgaacctcatatgccacggcagcgagattttttccctgtgccagtgcgatgtgtttttttatggtgatatcaccggcctcatatgtaaagcatatggttccatcgtatgtgaactctcttatatattggatgccgtttgtgtggcatccgcccttgaactggtcacttgagagatcataggtgtggccgtctgtgactattttttcgtttgtctttgagaagcagacgtatctttgcacaggagcatgaaggcttgcaatcagatagccctgatgcgtacggtttatcgcaccggtgactgaaccgccggcatatccgccaaggccgttggttaaagcccactcccttcttatgttgtttttgaaatcgttttgtacttttatgttaaattgcatcgtaatcccccgaaatttcactaaaattttataatattttaacatataactgtgaaaaaatctatacgaaacggcaaaaatctgttatcattataaagatatatattttcaatatgcaaaggagaattataatggaagtatttacattgattgcacgtaaaaaaaatgtggcgctggtatttgtttcgtacctgcttgtggctcttgctgcgataagtcttctgactatctgcatcggctttgcaccgggtattttatttgcagtagtatttggacttattgcatatcttatgataatggcacagaacaccgagtttgaatattcatattttgacggagagctgcgttttgccaaaattaaaaacaagagccgcagaaagcgtcttggaatatacagcatggagtctgtagcagcaatcgcaccggcaggagacagaagcgtatacaattacgagaatggaaaagagctcaaggaaatagactatacctcaggtcagaaggatgtaccttattatgatatcgtcatcaaatcgcctgaagagaatgtgcttataaaggcggagcttgatgacaagttcctcacagaggtggagaaaaaatacagatcaaaggttaaaagaagagaggagtaattactcctctccttccaaatggtacattttggattttgttttgccgacatcgtgggcagagattctctttatagtcatatggcagaggacttttacagttttcacatacttttgtgttggtgttaaaaagacttttaggattatccatgggtgccgccttaagcttgttttattcactatatcataacagattttataaagaaagtagggacttttataatgtcaattgcagttttcgattcaggagtcggcggaataagcgtcttaaagagcctggttgaagtgatgcctaacgaagattttatatattacggtgattcagcaaatgcgccttatggtaccaaaacacttgagcaggtgcgagctttgacctgtgagcatgcaaaggagctgattttaaatcagcatgcaaaggggcttgttgtcgcatgcaatacagccaccagcgcggcagtgcgtatattaagagagcaatatcccgatgttcctatcgtagggatagagcctgcagtcaagcctgcgatgctttttatggaaaatccgagagtgcttgtgatggctacacctatgactatcagggaggaaaaacttaaaaagcttatggacagatacagacacttgggtgagattattccattgccttgtccggggcttatgaatttcgttgagagaggtgacttgtacggtgatgatgtgagacagtatctcgaggaacttttgtattcatattcgcataatgagatagatgcggttgtgctgggatgcacacattatccgtttgtcagaaaaatgatacaggaggtgcttggagatagggtgcgtgtgttcgatggaggaaacggtacagcgcgtgagatgaaaagacgtctcgcagaaaaaggtctgctgacagacagcaccgctgcaggtattgtggattttcaaaacagtctgaccggtcagagccacgaagataaaatacagctctgtaaggcgctttttaacaaaaaaatttagttgttatttacagaatattacaaatctaaaaaaagtataaaataatcacgacttttttaataaaatatttctaaaatgtacattgttaggacataattaccacatatacttgttcttgtaagaggaacaaaaccttttacattattccctttttattaataaacattttcataactaaactcctcgagaaaggatcgcgttgttaccgcgtgtaacatcgcggtcctttctcacgttttgcatgcaggctgcggagccgcagccttactgttttagttatgcataacgcttccacatatatcgttcagcacacacatgtcacagtgcggtgtggttcgggcagtgcatacggcgcgtccatgatcaaccagcctgtggcagaagtcgttgctctcctcgggtgggatgattttccaaagctccatctccacttttttcgggtcttttattccatctacaagtcctatacggttgcaaaggcgtatgcagtgtgtgtcggtgacgatggcaggcttgccgtacacatcacccataatcaggttggcactctttctgccgactcccggcagcttcagcagatcggtcatattgtcaggcacaagaccgccaaaattatcgcgaagcattctcatgcaggcacttatatcacgtgccttactctttcccaggccgcatggacgtacaatttcttctatgtcggaaacatcagcatcagcgagagcctcgattgaaggatattttttgaacaaatccaccacgactacatttacgcgggcatcagtgcactgggctgcgagcctgactgatacgaggagcttccatgcctcgtcgtactcaagagtgcaatcggtgcggggatatgcggtttttagtctttttattacttcaatggctaatttttcttttgtcatatgagcctccttattctttatttcataactattcagaaccacccacgcatattcgcaaaaccgcacgatactcgtgctttgtctacactccgtttcggtccgcgctgaacaaacgtccaccggacgtttagctccactgctacgcagctgattttgctcatatgtgtggggtggctctattcgagccacctagagaacaataaaacctgctgcttacatgcaagcatgacgcatcagcttttcttgttatcagtggttctgaatagtaactttattttatagtatacaaaaatgcgcggagattgtaaaatggatttacgtggagcggattacgtgagaggaacggtgtgaaacttgaaaatatgaataatgcatatgcaaataaaaaatgtacaaataacatatatataaacaacagatatacaatagaagtaactaggaaaagaataaaaaacatgtatcttcgtgtgaagaacacggatggcacactatcagtgagtgctccttatggcatgagtgatacagaaatcaggaaattcgtggaaagcaaatcagactggattgagcggaccatgcaggaaatgcttgtcgcaagacagcttaaggaacaggaaccggttttggcgccattcatggagagagagctgcgcagggagcttaaaatgcagctgcagaggcttatcgacaaatgggagcctgttatgggagttaagtcagccggctttacgataaagaagatgaagacaaggtggggatcgtgcaacgtgaagtcacatcatctgaatttcaaccttctgctggctaaggtgccgtcagagtgcgcagagtatgtggtggttcacgagcttacacatctgcttgaaccaagtcataatgccaggttctggtcgctgatggaatattatctgccggaaagcaaaaagctgcgtaaacaacttgctggcttttctgcgcaggatatgatatgatatcattaaagacccacttagagaaaggaagcttcaaatggaattttgggatatatacgataaggataaaaagccgacaggccgtacaatgaaaaaaaacgactggatacttaaggatggagagtatcatctttcagtgcttggcgtgattcacagaccagatggcagattccttatcacacagcgtgtcatgacaaaggcatgggcaccgggctggtgggaggtttcaggaggagctgcacaggcaggtgagagctcatttaccgcagtctgcagagaggtgaaggaggaggtaggccttgatgtatcacagtgtccgggagggcttgcctatacctatcacagagagaatccgggcgagggtgacaactatttcgtggatgtttaccgctttgagcttgatttcaaggagtctgacgtacagattcagacagaggaggcacttgggtttaaaattgccacactcgatgaaataaaagagcttgctgcgcagggtgtgttcctgcactatgacagcataaagcaggtatttgaaaattaattgctatgattatgataataagataacatagaattataagatttcatagaactataaggagcagattatggcattaccaaaggatccggttatgctgcttagctttgtaaacacacagcttcgggacaattattcaggattgaaggagcttgcggcagcatatgatattgatgagaaagagctttgcgacaagcttgcacagattgattacaaatatgacgagactgtcaatcagtttaagtagattttcagcatacatattaaaagtgatggaaggataagataatggagacatgctgcgatttttgtgcatacaatgaatatgatgaggatgatgaggagtattattgctcggtaaatatggacgaggatgatatggcgagatttgtccagagcagctataagcgctgtccgttttaccgctcaggcgatgaatacagggttgtccgtcaccagatgtgaagcattataacaaaatataataaataataaaaaaataaattgcattaatcaatttaaggctgtataataagttggttattttaaaaattaagaatttacaaatatacaaagcatattgataaggaggaaaattatgcctgtaaaatacgtgttcgtcaccggtggagttgtttccggtcttggaaaaggaattaccgcagcgtctcttggacgtcttttaaaagctcgtggatacaaggtgacaatgcagaagttcgatccatacattaatattgatccgggtaccatgaaccctattcagcacggagaggtgtttgtaacagacgatggagctgagacagatcttgacctgggacactatgagcgttttattgatgagagcctgacaaagaactcaaacgtcaccacaggaaaggtatactggtcagtattacagaaagaacgtcgtggtgactacggcggaggaacagtacaggttatccctcatatcaccaatgagataaagagcagattctacagggatttcacatctgaggataccacaatcgcaatcatcgaggtgggcggtacagtcggcgatatcgagagtcagccgttcctcgaggcaatcagacagttccagcatgaggtgggacacgacaatgccatcctgtgtcatgtgacactgattccatacatcaaggcgtcaggagagctcaagacaaagcctacacaggccagcgtaaaggagcttcagggcatgggaatccagccggatatcattgtatgccgttcagagcatgagcttgaccagaatcttaaggacaagattgcgctgttttgtaatgtaccgaattcacatgtattacagaaccttgatgtggagtatctctatgaggcaccacttgccatggagcaggagaatcttgcaaaggttgcatgcgagtgcttgaatctcgactgtcctgagccggatcttgcagactggaagcagatggttgaggatctccgtcatcctgataaagaggtcaagattgcgcttgtcggaaaatatacagcacttcacgatgcatacatttcagttgttgaggcactgaagcatggcggtatacctgagcataccacagtcgatataaagtgggttgactcagaggagcttaatgatgacaatgcagcagaggtattcaagggtattcagggaattatcgttccgggaggctttggagaccgtggtgttgagggcatgattgcagcagctaagtatgccagggaaaacaatatcccatacctgggactctgccttggaatgcaggtggcaatcatcgagtatgcgcgccacgtatgtatgttccatgatgcacacagtatagagcttgatccaaacactactcatccggttatcgcacttatgcctgaccagaacggaatagaggatatcggaggtacacttagacttggctcttatccatgtgtactcgacaagacatcaaaggcataccaggtatacggtacagagaatataagcgagcgtcatcgtcatcgttatgaggtcaacaatgactacagaacagctctcacagagcatggcatgaagctttgtggtacatcacctgatggcagaatcgtggagatgattgagattccggagcatccgtggtttatcgccacacaggcacatcctgagcttaagtcacgtccgaaccgtccacatccgcttttccatggcttcatagaggcggcaaacaaggtgaacagataatttttcgttatatttaatacaatatttagaaagtgcggttgattttgaccgcactttttcttataataaagtgaagcttcacactttatatattgtgaggagacagtttcatatacaatatgttcctcggaaaataagaagtctgtaatgatatttttcggggatagggtttcatgggaatgactataaaaattacaggtcaaaattgccttgaagcttgtaataaataagaaaagaacggagaaaatatggataatcagggacctaataactataattacaacaatggcccgggcaataatgggtctggtggaaacggaaataacggcggtaacagatctggtggaaatggtggcagaaacaaccgtggcggacaagggatcatggcatttatcctgctgacactcgtggcattgtttgtgtatgcacttatatcaaacagcatatcgcatgccagcacacaggaaaagtcatacagtgatttcataaaacagctcgacaagggtaatgtcaagagcgtggagtttgattcctacgagatagactacaagcttgtggatgacggacacaagaattatgacatcacatattacacaggccgtgtggctgatgatgagcttgtgccgacactcaaaaaagcaaagacctcagagggcaagtctattgagataaaggcagcgatacctgataatacatctacatggatttttaatatattaagctttatagttccgcttattctgctgtgggtgcttttagcatttgtttcaaagaagatgggcggcagcatgggaatgggagtcggcaaatcgactgccaaggtatatgtggagaagtccacaggtgtcaccttcaaggatgttgcgggacaggatgaagccaaggaatctctccaggaggttgttgatttccttcacaatcctaagagatatacagatatcggagcaaagctgcctaagggtgcgcttctcgtgggacctccgggaacaggtaagacactccttgccaaggcagtagcaggagaggcaggagtaccgtttttctcacttgcaggttcagactttgtggagatgtttgtcggagtcggagcttcgagagtgcgtgatttgttcaaggaagcgcaaaagatggcaccatgtattatctttatcgatgagatagatgcaataggaaagagccgtgacagcagatacggcggtggcaatgacgagcgtgagcagacactaaaccagctccttgcagagatggatggctttgatacatcaaagggattacttatattagcagcaactaaccgccctgaggtgctcgataaggcgcttcttcgtccgggacgttttgacagaagaatcattgttgacaagcctgacttaaagggacgtctggagaccttaaaggtacactcaaaggatgtcaagatggatgagtcggtagacctcgatgcactggcacttgcaacagcaggacttgttggctcagatcttgcaaacatgattaatgaggctgccatcaatgcagtcaaaaacggcagacagcttgtaaaccagtcagatctctttgaggccttcgagcttgtagcagtcggcggcaaggaaaagaaggaccgtgtcatgagtgataaagagagaaaaatcgtctcataccatgaggttggacacgcacttgtatcagccctgcagaaaaatacagagcctgtacagaaaatcacaatcgtaccacgtaccatgggagcactcggatatacactccagacacctgaagaggagaaataccttgagacaaaggatgaacttctcgccaaaatcacaacatatatggcaggtcgtgcagcagaggtgctggtatttaactcagtcacaagcggagccgcaaatgatatagaaaatgccacaaagatagcccgtgccatggtaactatgtacggaatgtcagataaatttggcatgatgtgccttgcaacagtacaaaaccagtacttagagggcggagcaggattaatctgcggagagaatacagcatcgcagatagatgatgaggtactctcaatcatcaacagcagctacgcagaggccatgaagctcctcgatgaaaacagagaaatcctcgacagtatatcagattatctctacgagaaggaaacaatcacaggtaaggaattcatgaagatgttccgcgatatgaagggacttccggatccggacgaggaaaaagatggtgaaaataacgaagagcaggaagctgcacagaacgatacgacattagcagcagatccactccttcgtaacgacacagaccaacctgcagatacaaatgaatcttccgaatatacagcgccggatgataatacattgaataactagtaccttataggtcaattttcgaacacaacgagcaaccaagcaattttcgcgtagcgaaagagcgaaaaaagaatttcgtacaaaaaagcgcagtagaaaagagtttcgcacacataaactgaaaaagccggagggtacacagtgtgttcagaaggaaaatatgaactgccgcgggcttccgggcaagaaaagggacgaaaaagccttgcaaacaaagaaaaccaaacggagagaaaccccgcggctgacttcatattttcctgaggaatacactgtgtgccatgtcggcaaccacacaacctgaaggtgcgaaactccacaacaacccaaagagcgaatatggaaaaaacatttgatatcaaagaagaattaaaaaaactcccggatgccccgggagtttatattatgcatgacaaggatgatgtaatcatatatattggcaaagccaaaagcctgacgaagcgagtacatcagtactttcaggcgagccacaatgagggcatcaagaaaaaacagatggtagagcatatagatcattttgagtatatagttaccgactctgaacttgaggcccttgttttggagtgcaatctgataaaggagcatacaccaaagtacaatactatgcttcgtgatgacaagacatatccgtacatcaaggtgacactgggagaggactatccgagggtgctgttttcgcgtcagatgaaaaaggacaaatcccgttactttggtccgtatacgagtgcctctgcggtgaaaagctcaatagatctgataaacaaaatctataagcttcgcacctgcaaccgcaggctgccgcgtgatataggagcagaccggccgtgcctcaactatcatatacaccagtgcagtgcaccatgccaggggtatgtgacgaaggaagagtatgccatatctgtaaagggcgcgatagatttcttaaacggcgactatgagcagacaataaaggctcttagcgataaaatgctaaaggcctcagagagcatggagtttgagaaggcggctgaatacagggatctgataaacagtgtgaagcaggtagcgcagaagcagaagataacaaatgccgacggcgaggataaggatatcatagcacttgcaaatgacgatactgatgcagtggtgcaggtatttttcataagaaacggaaagctgataggcagagaccatttccatgtgagggtcggaagcgaggaggcagcggatgatgtgctaaataactttgtgaagcagttttattccggaacaccttttataccgcgcgaggtcatgctgcagagcgagatagaggatatggctgttttggagcagtggctcagcgaaaagcgaggcaggcgtgtaaatataaaggtgccgcagaagggcatgaaggaaaagcttgttgagcttgcctacaagaacgcactcttagtgctcagccaggataaggagcggataaagagagaagaagggcgcacaataggagctgtaaaggaaatcgagggacttttgggcttacacggcttaaaccgtatggaggcctatgatatttccaatatcaacggctttgagaccgtcggctccatgatagtgtatgagaagggcaagcctaaaaagagcgattacagaaagtttaagcttcgcacagttacgggacctgatgattatgcgtcaatgcacgaggtgctcacacgccgctttacacatggcatggaagaacagaagcagcttgaaaaagatggatctccacaggaaataggcagctttaaccgttttccggatattataatgatggatggtggaagaggtcaggtaaatatatgccttcaggtgctttccgagctgggactcgacatacctgtgtgtggcatggtgaaggatgattttcaccgcacaagaggtctttattacaacaatgtggagatacctatcgaccgccacggtgaaggcttcaagctcatcacgagaatacaggatgaggcacaccgctttgcaatagagtttcacaggtcactgcgctcaaagagtcaggtacattcggtgcttgatgatattgaaggcatagggccggcgcgcagaaaggcgcttatgcgccgctaccagtcgctagagaagataaaggaagcagatgtcgatgaccttatgcagacagagacaatgaacgagaaagcagcacaggcagtgtatgcatttttccactctgccacgtagattttgaagctaatctgtggtatactaaaaaacaaatatacatcaagggggaccgcgaatgaatgcattacactcagtatcagttgcaaaggtagcagaattgctcgatctcaacaatctcacaaaagagatgaacctaaaggagaggacgatagagtgctcggacgtcaacagaccggcgcttcagctctcaggatattttgagcattttgaggagagacgaatacagattatcggaaatgtagagtatacttatatagagaagatgagcgacagcgagaaaaaagagcgctatagccgcttcatggagtttgatataccatgtatcatcttctgcagagatttacagccggatgagatatttatggaagaggccagagagcacggtattccggtgctgtcaacaggccgttccacatcaagctttatggctgagctcatctattgtcttggtgagcagctcgcgccatgcatcacagtgcacggcgtgctggtagatgtatacggtgagggagttatgatcacaggtgagagcggtataggaaagagtgaggccgcactcgagctcatcagacgaggccatcgtctcgtgacggatgatgtggtggaaatcagaaagatcaacgagcatacgctcatgggcacatcgcctgagataaccagacactttatagagcttcgaggcatcggaatcattgatgtcaagacactttacggagtagagtgtgtaaaggaaaaacagcagatagatctcgtaatcaagctcgaggactggaaaaaggaggcagattacgacagactcggcctcgaggaagaatatgccgagtatctcggcaacaaggtagtgtgtcattcactgccaatcagaccgggacgtaatctggcggtcatcgtagagacagcagcagtcaatcacagacaaaagaagatgggctacaatgcagctcaggagctgtatcgccgcgtccaggaaaatcttacaaaaaattcggaggtataataaatcatggcaatagaaaagaaaaacgcctgggagaaatatccccagggacctgaaagagaaaaattatttgcatttgcagaggattacagaaggtttatatccggctgcaagacagagcgcgagtgcacggcagcagtttatgctgacgccacaggacacggctttgtggaccttgatgagctcatcgagacaggaaagagcgtaaaggcaggagataagataatagcaaacaatatgggaaagggactggcattgtttatcgtgggcagtaagtctcttgagaagggtatgaatatccttggagcccatattgattcacctagaatggacttaaagcaggtgcctttatacgaggacacagacatggcacttttcgatacacattactatggcggcatcaagaaatatcagtgggttacactgccgcttgcacttcacggagtcatctgcaaaaaggatggcagcacagtgacagtcaatatcggagacaagccaaatgatcctgtagtgggtgtgagcgatctgcttattcatctgtcaggcgagcagatgggcaagaaggcttcagaggtcataaagggcgagagccttgatgtgctcattggaagcataccgggaccagaaaaggacgatgacgacaaggatattaaggagagagtaaaggccaatatcctcacaatactttcacaggagtacggtgtggacgaggatgatttcctttcagcagagatagaggtggtacctgccggagaggcaagagactacggacttgacagaagtatgatcatgggttacggccacgacgacagagtgtgcgcatatccttcatacagagctatgcttgagatagagggcacaccggaatatacaagtgtatgcctgcttgtggacaaagaggaaatcggctcagtgggagccagcggcatgcagtcacgctttttcgaaaactgtgtggcagaggtgatgaacctggcaggagactatagcgagcttgcagtcagacgtgcactgaaaaactcaaaggtactctcatcagacgtatcagcagcctttgacccgaactatccatcggttatggaaaagaagaactcggcatacttcggaaagggtcttgtgttcaacaaatatacaggcgccagaggcaaatcaggctcaaacgatgccaacgcagagtatgttgcaaggcttagaaatatcatggatacagcagatgtttcattccagacagcggagcttggaaaggtagacgagggaggcggcggaacaatcgcatatatcctcgcaaactatgacatgaatgttattgacagcggtgtgccggtgctcaacatgcatgcgccatgggaaatcatcagcaaggtcgatttatatgaggcattcagaggctacattgcatttttgaaggaagcataggctaaaggaatataagatgaatcagacatttgtaaaaagtgtaacagaacaattgccgcagcttggtctcctgcaggatgagccgatgaaaaaacacacgaccttccgcataggaggcccggcagattactatgcagagcctgatatgagccggatttcaaagcttatagagatggctaaggcatgtgatatgccggttacagtgataggaaacggaagcaatctgctggtaggagataagggcatcagaggccttgtaattggtattggaaaaggcctgtccgaaatcgaggtgacagaagctgtggcgcagcaaagcacagcgcaggacctcacagcacaagacaacggtcatatcatcacagcgggcgccggggctatccttgcagcagtggcggcaaaggcagcggaggtatcgctttcaggtcttgagtttgcatcgggcatcccgggaagtgttggaggcgcggtagtcatgaacgcaggagcctacggcggagagataaaggatgtcctaatcgatgccacagtgctcacagcagagggcgagctaaagactgtcacaagggatgagcttgacttatcctacaggcacagcatagtcccggaaaagggctatatagtgctgtcagccagattcagactcacaccaaagcctaaggatgagataaagtcatatatggcagagcttcgcgcaaagagagtggagaagcagccgcttgagtacccaagtgcaggcagtacctttaagagaccggagggctattttgcagggaagcttatcatggatgcaggccttcgaggttacagcgtgggagatgcacaggtgtctcaaaagcactgtggctttgtagtcaataagggcgaagccactgcagcggatgtcctgacactcataaaagacgtgcaggaaacagttttaaagcagtttggagtaaagctcgaaccggaagttaagatgattggagaattctagtgaaatttgtaatagtgacgggcatgtcaggtgccggaaaaagcacagcaatgaaaatgatggaggatatgggatatttctgtatagacaatctgcctatacagctattagataagctcatagacttttcaaacacctttcacagtgatgtgtccaaggtggcagtcggcatagatgtgcgaaacggctcaggaattgatgcgattccacagacactcgagcagctaaggcagaaaaattttccgtatgagatacttttcctcgatgctgaggatgaggtgcttgtaaagcgatacaaggagacgaggcgtaatcaccctctcgcaggaagtgagcgcatcaataagggcatcgtgcttgagagggaaaagctgcagtatttaaaggacaatgctgactatatcatagacacaagccagcttctcacaagggagcttaaaattgagctggaaaagatatttgtgcagaatgaggattacaagaatctgtttatcacgatactgtccttcggcttcaagtatggcataccgtcagactctgatatagttatggatgtgaggtttttgccaaatccctactatgtggacggactacgcgcgaaaaccggcaatgataaggagatacaggactatgtcatgcagtttccggaggcaaatgagtttatcgacaagcttgatgatatgataaagtttctcattccaaactatatctctgagggcaagaaccagcttgttatatctataggctgcaccggaggcaagcaccgctcggtaacgcttgcaaacgagctgtacaagaggcttagcggctgtaatgactatggacttaagatagagcatcgcgacataggaaaggatgcattgagaggtaaataacatgtcgttttccagtgatgtaaaggaagagctggcaaagcaggtatcaaagagcaggcactgtcagctcgctgagcttgcaggcatcatagagctttcgggccgtatcaatgaaaaaacaaagggacttgagctcgacaccgaaaacctgctgcttttaaataaatatgccacacttatgaagcgtgcctttggcacagataccacaaaggcgctggatgagcaggataccggaaaaatacttgcagcgcttaaaatcacggcacagcctgtcaacagacagaccgcagacggactgcttcttatgcagacatgctgcaagagagcctttatcaggggagctttcatggcagcgggctcgataagcgaccccaacaaagcgtaccattttgagatagtgtgtcatacgaaagagcaggcaaggcagcttcaggagctcttgtgcggctttgatacggatgccaagatagtagagcgcaaggggcactatgtagtgtacataaaggagggcgcccacatcgtggacagtctcaacatcatggaggcgtatgtgtcactcatgaagctggaaaatgtgcgcatattaaaggaaatgcgcaacagtgtaaaccgtaaagtaaactgcgaaaccgcaaacatcagcaagactgtgaatgcggctgtaaagcagatagaggatatcagactgatacagaaaatgagaggactcgatgatttaccggcgcagcttcgggagatggcgctgcttcggcttgaatatccggatgcaccgctaaaggagctcggagaatatctggatccgccaatgggcaaatcgggagtcaaccacaggcttagaaaattatcggcgattgcggaggaactgagatagatgaagaaaaagcttttatttatatttaatcccaaatcaggcaaggggctcataaaggagcatctggtaaatatcgtggacatcatgacaaaggccggatacaaaatcaccatttatcctacacagtgtcagggagatgccataaaaaaggtcaggaaaaatgctaagaagtatgaccttgtagtgtgcagcggcggagacggcacactcgacgaggtagtgaccggcatggagcaaagcgaggtaaatgtaccgataggatacatccctgcgggcagcaccaatgactttgcaaactctctcggcataccaaaaaatatggaggaggccgcaagagttgccgtaaacggtactccattcccgtgtgatgtgggaggcttcaacggagataccttcgtatatgtcgcagcctttggcctttttacagaggtatcctaccagacctcgcagcagatgaaaaatatactgggacatgccgcatatattttagagggtgcaaagcacctgatggatatcacctcgtacaggatgaaagtgagccatgacggtgagataatagaggatgagtttatatatggaatggtgaccaactccctttcggtaggaggcttcaagggcatatcaggtcctgacgtactgcttgatgacggcctttttgaggtgacactcatcaagaatccaaaaaacccaatcgagctcaacaagatacttgcgggactggcaaaccgtgaaaatgacaatgagctcatctactctttcaagaccagtgagatgcatgtggagagtgaggaggaggtaccgtggacactcgacggagagtttggcggcagccacacggatctgaccatcactaatctgaacaaacagattaccattatgtgctgataaatacaaaatcggacataaaatagtaatagtacacaattttttgtctgattgtgttaaaaatttaactttatttttataaggttatgtaatataataacattagcttttaattaacaggaggaaaaaatatgttagtatctgcaacagaaatgcttaagaaagcaaaagaaggacattacgcagtaggtcagttcaacatcaacaaccttgagtggacaaaatcagtacttttaacagcagaggagcttaagagccctgtaatccttggtgtatctgagggtgccggaaagtacatgacaggcttcggtacagtagcagcaatggttaaggctatgcatgacgagctcggtatcacagtacctgtagcacttcaccttgatcacggcacatacgaaggatgctacaagtgcatcaaggccggcttcacatcaatcatgttcgacggatctcattatccaatcgatgagaacgttgcaaagacaaaagagttagtagcagttgctcatgcaatgggcatgtctatcgaggctgaagttggttcaatcggtggcgaggaagacggagttgttggaatgggcgagtgcgctgatcctgacgagtgcaagagagttgctgatcttggtgtagatatgcttgcagcaggaatcggaaacatccacggaaaatatcctgcaaactggcagggactcagctttgagactcttgacgctatccagcagaagactggtgttatgccattagtacttcacggtggtacaggaatcccagctgacatgatcaagaaagcaatcgaccttggagtatctaagatcaacgttaacacagagtgccagctttcattcgcagatgcaacacgtaaatacatcgaggccggaaaggatcttgagggcaagggatttgaccctcgtaagcttcttgctccaggtgctgaggcaatcaaggcaacagttaaggagaagatggagcttttcggatcagttggaaaggctgaataatattattgcaatttagtatttttgcacatactactttacaaaatatttatatcttgtagtaaaattttataaaacttaacttttttaacataaacacttgatttttgatactcaaaggagtatcttaatttcagaaataatgttaagcgaaatgaacgagggcgttccaccatagatggagtgccctcttttttaataaactgagaagtccggcataaaacaagaatatttgagtttatatgttgtgcagctgtttaaacattatttgaaaataacaattcactcaaggggattgatgaacagaaaggatgtaagatatgagcgaacaggaatatttcaacgtagcagacatctttggagagaacgtatttaacgatgcagttatgcaggagcgtcttccaaagaaggtttacaagaagctccatgaggttatggacgaaggaaaggagcttgatctcgagactgctgatgttatcgcacacgagatgaaggaatgggccattgagaagggtgcaacacactatacacattggttccagccacttacaggcgttactgctgagaagcatgattcatttattacttctccaatgccaaacggaaaagtacttatgagcttttcaggaaaagagttaataaagggtgagccggatgcttcatctttcccatcaggtggtcttcgtgctacatttgaggcaagaggatatacagcctgggattgtacatcacctgcatttgtcagacaggatgcagcaggcgcaacactttgcattccaacagccttctgttcatacacaggcgaggctcttgatcagaagacacctcttcttagatcaatggaagcaatcaacgatcaggcactgagacttcttagattattcggaaatacaacatcaaagaaggttactccttcagtcggacctgagcaggagtacttcattgtagaccgtgagaagtatttacagagaaaggatctcatcttcacaggacgtacacttttcggagctatgcctccaaagggacaggagatggatgatcattatttcggagctatccgtgagagaatcgcagcttacatgagagatgtaaacaaggagctctggaagcttggtgtttcagccaagacacagcacaacgaggtagcacctgcacagcacgagcttgcacctatctatgctgagtgcaacgtagctgttgaccacaaccagctcatcatggagacactcaagaaggtggcaggccgtcacggactccagtgcttacttcatgagaagccattcgcaggagttaacggttcaggaaagcatgacaactggtcaatcacaacagatgatggtatcaacatgcttgagcctggcaagacaccacatgacaatgtacagttcttacttgtactcacatgtatgttaaaggcaatcgacgagcatgcagcacttcttcgtgcggcagcagcagatgtaggaaatgatcacagacttggagctaacgaggcaccacctgcaatcctttctatctaccttggagaccagcttggagacgtattgaaccagcttatcgcaacaggtacagctacacacagcttaaagggagagaagcttgagacaggtgttaagacaattcctgatttcatgaaggatgctacagaccgtaaccgtacatcaccattcgcattcacaggaaataagttcgagttccgtatggttggttcacaggattctgttgcacaggccaacatcgtgcttaacacaatcgttgctgaggcattctcagacgcttgtgatatacttgagaaggcagacaactttgacctcgctgtacatgatctcatcaaggattacgcagtagagcaccagagaatcgtattcaacggaaacggatactcagatgagtgggtagctgaggcagagagacgtggacttccaaacatcaagtctatggtagatgcaattcctgcatacgttgctcctgagtcagttgcagcattcgagaagttcggtgtatttacaaagacagagcttgagagccgtgccgagatcgagtatgagacatatgcaaagactattaatatagaagcaaaggctatgattgatattgccggaaagcagattattcctgcagttatcaagtatgttacatcacttgcacagtcagttaactcagttaagagtgcagttgctgatgcagatgtatctgttcagtcagagcttcttacagagagctcagctcttctctcagatgcacaggttgcacttgcaaagcttaaggatgagacagcaaaggccggtgctatggaagagggcagagagcaggctgtttactatagagatgttgtaaagactgctatggatgctcttcgtactccggttgatgagcttgagatgattgtcgacaaagagatgtggccaatgccatcatatggcgatttaatcttcgaggtttaatccttgtagtttaaggcccaaagcttacggaaagctgtttagagcggcatatatgatttaatttaacataataataaaatggagacattttgctgaaccacgaagctgtggaaattggtgaagtgtctctatttttttataaattttatttttgataaaatgaaagaagaaacaggaaagagaggacattactatgacagaagagattagtggagtaattttcggagtctggttccttattggagcagcattggtattctggatgcaggcaggttttgctatggtagaagcaggttttaccagagcaaagaataccggtaacatccttatgaaaaacctcatggatttctgtattggtacagttgtattcatactgattggtttttcacttttattaggtgaagatgttcttggttttataggtaaaccgggatttgacatctttacatcttacaaagattttgactggtcaaactttgtattcaacctggttttctgtgcgacaacagcaactatcgtatcaggagctatggctgagagaacaaaatttatttcctactgtgtttattcaggagttatttcggcagttatttacccaatcgaggctcactggatctggggcggtggctggctttcacagattggcttccatgatttcgcaggttcatgtgccatccacatggttggtggtatcagtgctcttgtaggagctgcaattcttggacctcgtatcggaaagtttacaaaggataaaaacggaaagattacaaaggtaaacgctattccgggtcataacatcacaatcggtgcactcggtgtattcattctctggcttggctggtatggattcaacggtgcagcagcaaaatcagtagagcagcttggttctatctttgtaacaacaacaatcgcacctgcacttgcaacagtagtttgtatgattttcacatggctcaaatatggcaagcctgatgtgtcaatgtgtctgaatgcttcacttgcaggacttgtagctatcacagcaggctgtgatgtaacagatgcacttggtgctatcattatcggttccgtagcaggacttctcgtctgcttcggtgtatggttccttgacaatgtacttcgtgttgatgaccctgtaggtgctgtcgcagtacatatgatgaatggtatctggggaacaatcgctgttggactttttgccacaaacagtgctccgggatattcaatcgctgattcaaagggcaacgagctcgtaggacttttctacggcggtggatttaagcttttaggactccagctcacaggctttgtttctgttgcagcatggacagtagtaactattacaatcgtattccttgttatcaaggctacactgggacttagagtttcagaggaagaggaaatcatcggacttgacccaacagagcatggtcttccatcagcatacgcaggatttgctatcatggatgtatcaggtgatgttatggatgtcaatgaaaatacagaccttggttcttcagagtatgcaacagcttctaaggcaaagaaggatgcagcagtgcctgttgtaaatgcagcaacaccggcttcagcaagcggtatccacaaggttgttattatttcaaagcttacaaagtacgacaagcttcgtaaagctatgaatgacttaggtgtaacaggaatgacagtgacacaggttatgggctgtggtatccagaagggtgccggcgagaaataccgtggagctgagcttgatgcgacattacttccaaaggttaaggttgaggtaatcgttggcaagattccggtagaaaaggttattgagactgctaagaagactctctacaccggacatatcggagatggcaagatcttcgtttacgacgtggcacaggttgtcaaggttcgtacaggcgaggaaggaattgaggcattacaggatgtagagtaatgcaaattattatctaatccccttagcatatatacatcaacaaaaacccccgaggatatgatccttgggggttttgctttagataattaagttgtgaattgtaatggttaacaatgagtgctaccggtcactgttaccggatgaaccggagctgccagtatcagtaccacctgaaccggagccaccagtaccagcacctgagccagcaccggtaccagttccggcttcacctgtctgtgctccagccgcagtgccgtcagtactgcccggtgtagtaccggaattggtaggatccgtggtggttggtgagctgttgatcagcgatgttgcatcatgtaatgtacatacggtattcatgaacgtatcatccgccatgaattcatactcagggctgcctgatacagcgcctgttataaatacctttgatgttttattcggacaatacggaccggcaatggctcccgaatcggcacaaatttcaagtgcaacatgatggtcgcagctgtctgtcggcacagtgtccgtatcaaaatattcggttgtcagcattgatcctcgaggatcattgtcacatgttccctctaaaggaacaagtcctgatttgctgcatacagtggtatttgttataccatccggctgtacaaagtctttggtttcaagcccttcatggattctgctcattgcatttctccatatattcttagggtaggatgtgagcttgccggactgttttgagttgtcatcatagccgccccatacgacacatgtgtagtatggtgtgtagcctgcccacaggcagtcgcggttgctggttgtggtaccggatttacccgcctgggctatctggctgtcaaagcgcgccagctttccggttccctgtgtcagaacatccttcatggcatctgtaagaagccatgccgtagtatccttgattacagtacgtgtgtcctgtgtagtggtcttgtcaagtaatacattgccatcgtggtcaagaacctgagtgtagaactttggctctaagtatactccgccgttggctatagtagcatatgcacctgtgagctcaaggtttgtgacaccctttgtcagtccgccgagcgccagtgacaggtttttgtcggaatcggtgagagttgaaataccgaaatcctccgcatatttgtaaccgagctcaaccccgatatcctgtaaggttttgactgttacaatattgatggactttgttattgcccatcggatggaggtaaagcctccgaaagatttgtcatagttgttaaaggtttttgaacctactgtaaacggtgcatcatcctgcacggatgcaagtgttttgccgcctgcatcgagagcagcagcatagcagccgattatcttgaaggtagagccgggctgtctgcatgtatctgtggctctgttccatgttctgttgccggatttgtcaccgcgaccgcctaccagtgcctttacttcaccggtgctctggtcgatgactgtcatggcaacctgcggctccagcgtgatattgacagcttcagaaccctccacaattgaatcgccctcctcaagtacatcctgctcgtactgtgcaatagctgcattgcattcatcagggcttgagtagttgatgctgaaatcatcattgttggttttcttcttataaaaagagagcatggtttggttcgtgtaggtcttgtatgaaccgtctgccttttttacttcgaaggaaagctggaacgaatactttgcgtcggacggatagttggatggattgtttgcctcctcgtcgcatatagtctgcatagtaaggtcctgggtcgatttgatagtcagtccgcccttgtaaatcagcttgtaggcttctgtctcagagtaaccggcggctgtgagatcgtcgaacacgttgtcgatgagcgcatcaataaagtatgtgttcacagagcctgagcctgtagtgttgtactcagcaattcttgagtagacatcatcggccatggcctcatcatattgcgccttggagatatagccctgatccttcatgttatttaacaccttttcacgtctcttggcatttttgtcagggtgtgtgatagggttgtagccggatggattctgagtgatacctgcgatgacagatgcttcggaaagcgtgagctctgagacatccttgttaaagtacttcttggatgcggcctgcacaccgagggtatttgcccccagattgaccgaattcatgtagttttcaagaatccagtccttgtcgtttacctgcttttcgagctcaagggcaaggtactgctcctgaatctttctctgaagcttttctacaaaggaagtttcgcttgtccagctggtcagtacgttgttcttgatgagctgctgtgttatcgtgctggctccctcactgaatctgccctttgacagaccggagataaaggctcttccgataccatgcaggtcgatgccgttgtggtcgtaaaagcgttcatcctcgattgcaacaaaagcatgctgcaaatccagcggaatctcatcgatggtgacatactgcctgtttgccccctgacctacgagtgtggcggtttcttctccgtttgccgccagaacggtagttgagtagccggtaggagtgacatcgatctttgatatgtcaggtgcggaatcaatgattcccttcatgacaccgattcctgaactgatgccggctgcgcctgctacaattactacaaccagaagaatctttagaacaatgagcttgaacttgtttttgaccttagagctcttattgtcatatttccggagcagctgcattgtagcttttttgccgtaattcatatataggcctccttgtcattataaagatttgtaatcttgtttgtatatactgtgattagaaaataaacagtatacattattatatcaaatatagcatttaaatgcaatttacagattggttttcatattatataatacaggtaacaattataaagtgtctttaagatgcatgagtgtaatcaggcgatatcaggatggaaagaatatcatatgtcagagaatactataagcctgtacgtgtacaagggcggacagggtgagataacagagaagaaatcgaggtttatagcaaccgtaaggccggtagagtctgaggatgaggctgtaagcttcatcaatgagacgaaaaagaaatactgggatgcaaggcacaactgtagtgcctttgttataggaaagagacaggagctgaccagatgctcggatgacggggagcctgcaggcaccgcaggccgtcctatgcttgatgtgctccttaaggaaaatatccacaatgccgctattgtagtaacgagatacttcggtggggtgctgcttggcacaggcggactggtgcgtgcgtatcagcaagccacaaaggcggggctttcggcaagtgagataatagagaagaaggatggtgcagtactgtttatcaggacggactataccggaatcggaagacttcagtatctgtttgcacaggagaagattacggtgatggacacagcgtatgaggcggatgtgctcgtgaaagctgttatcccggaaaatgataaaaaacgcatagagaaaacaatcatagagcagacaaacggcacggcaaagcttgagtggggcgatgaggtgacatttgctgaatatgatggcgaggtattgctgtttaaaaattagccggtgctcacattttagcaggacaagcagaatttatattcaattaaaataaaaaaatgcttgacactatataatcacatgtgtataatatcatttgttgagacaacacattggcccatcgccaaatggtaaggcaacggactctgactccgtcatttcaaggttcgaatccttgtgggccagctaaagagaacttcgatagaagttctctttttttcttgtgtaataatgcgatttgttataaaataaaaacgtatatgacttaaacagttatagaaggatggtgtaatatgaacaagaattttttgagaattattaatcttatagaagaactcggctctgaaaaaaagacaccaattactatacagcaataccaggatatcattaataaaagctcaaatctttggatgtccaatggtgtggatgaagcgtttagatttatcagaagttacttcaattttatagactagaggaattagatatggctttttcatttgacagcagaatacgttacagcgaggtggattcgtcatgcagactgagccttacggggcttaccaattattttcaggactgtagtgtgtttcactcacagtcacatgatgtgggaatcagatttcttgctgacaatcatatagcatgggtgctttcatcatggcagatatgcataaacaggcttccactgcttaatgaacaggtaaagatatccacatgggcatatggtatgaaggcgttttacggttacagaaatttcacacttgaagatgcaggcggcagcacactggcatatgccaattctgtctgggtacttgttgatacacgaaccggcagaccggtgaaggtgcctcaggagtttgcggatacatacggtcttgagccacagcttgagatggagtgtgcaaagcgcaagcttcatattcctgatgatatggagaaaaagggtgagattgtggttcctcagttttttatagacagcaaccatcatatgaacaatgagaagtatgttatgctggcgcagcagcttctgccgaatgattttgaaatatctgagcttcgtgtggagtacagaaaagaagcaaagcttggtgatacagttatatcatacgtgaagtacacatcaaagagtgtgacagtggtgcttgcggatacggataaaaaaccgtattcggtggtggagtttttgagtaagccggtaccgggaaaataattataattccattatttaacaacgatacagttttgatacagaaaggacggaaaaacatgagattaggagaatatcaggagcttgtatgtgtaaagaaggttgattttggcatatatctgtcaacatcttcggcttcggaggagagggtactgcttccggcaaagcagattccggatggagtaaagcagggggataagcttaaggtctttgtatacaaggactctaacgacagacttattgctacgacaaacgagccaaagctgacacttggaggtttatcagtgcttactgtcaaggaggtgactaaaataggggcgttccttgactggggacttgaaaaggacctgtttcttccttacaaggagatggtcagaaaggtcagcgccggagatgagatacttgttacattatacatagataaaagccagagactttgcgctaccacaaagggtatttaccatatgctgagcaccgattcaccatacaaaaaggacgatatggtttcaggtcgtgtgtatgattttagcgacaatttcggtacatttatcgctgtggatgacaaatattcagccaagataccggtttttgagaatgctgcttatctgaagcttggagatgtgatagaggcaaaggtcactgatgtcaaggcggatggcaagctggacctgacaatgagggaaaaggcatatattcagatggattccgatgctgaaaagctccttgagctgcttgattcatacgcaggtgtgcttccgttttcggaaaaggcaagcccggaggtaatcaagagagaaacagggcttagcaaaaatgcattcaagcgtgcagttggtcatttatataaggaaagaaagattgatctcacggatggcaaaatccgtcttaagaaataacagtctttttaataaattttaacaggaaagaaggacaataacatgaaaaacgttatcagtacagacaaggcaccggcagcaatcggaccatattcacaggctatcgaggtaaatggtatggtatatacttccggagtgataccggtagtgccggagacaggtgaaattcctgagggctcacaggcacaggcaaagcaggcgtttactaacctgtcacatttacttgaagcagccggaacaagcatggataatgtggtaaagactacagttttcatcaaggaaatgaatgattttggtgcaatcaatgaggtatatgccacattttttaacggagcataccctgcaagaagctgtgttgaggttgcaaggcttccaaaggatgtaatgcttgaggttgaggctattgctgtaaaataaaattattacataagtatttcgtgtgacataagtcctgttcgttggaaaaagtcaagattttcttaagaattcactaagaaaacgttgacatatatatgttgctttgttataatgacaaagtaatatttgtaacaaattcgtaataactgttacaaattcatacaacggagggtaaaatgaaagtaaattatgtgaaactcacagccggagtgcttacaggttttatggctctgtcctcagtgccatatgcagtatatgcggctggacctactgcaggagtagctagttatacatcagatattgttagtacatcaaacactcttacagcgggtgttacatctatgttgacagatgtaatgttaaaaggtgatgatacatcagagactgcaacagatgttgcggcaacagatgctgagccggttaaatcagcatatgctgatacagcagttgcacaggttagcgacagcgttaatatacgtgcgagtgcagatgaaaacagcgagtctcttggaaagctctataacaatggaattggaacagtacttgagacaaccgataacggatggtacaaaatccagtccggttcagtaacaggatatgtaaaaggcgattatgttgtagtcggtgacgatgcactcgtacagagcgcaggacgtcgcgtggcaacagtcaatactgagacactcaaggtcagaacaacagcatctactgatgcagaagtacttggtctcgtgtccggagaggatgatctcacagttgtggatgagtcaacagccggatgggtaggtgtatctacagcagacggtaccggatatgtatctacagattatgtgacactcgatacagagttcacttatgctgagtctaaggaagaggaagcagcaagacttgccaaggaagaggcagagcgtaaggcggctgaggaagcagctaaaaaggctgaagaggcagctagaaaggctgaggaggcaaaagcagccaaggcagaagcaaagaagtcatctaagtcttcaagcaaatcatcaagcagttcttcatcagagaagagctatagcgcaccaagtggttcaaacggacaggctgttgttaattatgcatcacagttcgttggcaatccttatgtttacggtggctcaagtcttacaaacggaacagattgttcaggatttgtaatgtcagtttatgcacagtttggcatcagcttaccacacagctcatcagcaatgagaagcgttggatacggtgtgagcacaagcgatatgcagcctggagatatcatctgctatagcggacatgttgctatctactgtggtggaaacactattgtacatgcaagcaacccatcagacggtatcaaatatacatcaccggctaactacaaatcaatcattgcagttagaagaattttctaataaaattcatgccggataggtaaatatgaatctataaagaccttcatctcatcgagatggaggtcttttttacatatagaaactttatttttgtttatgatatttgaaataagtgacctgtatgatatacatatatgtttaaaaacgggactaatttaaacagaatggaaaactgggctgtcaagcgcaatttttatcacatatatcaaaatagcaacatgcacaaaaaagtggatatactgaacccggtaaattcggattggggataaatgtggataactatcaacaaaagtaaacctcaaagtgccctaaaaatgagttatgcacggagttatgcacattatccacatttttgaatgtgagcaaaagaacaactgttttgtaaagttctgataaagttgcactaaattagtaatatttcggaaataatattgacattttaattgtaaataatagtattaaaatactttataattgtcggacaacttgaaaagtgttgattatgtaagttaattttgttatacttcaaattatgattaaaaagatagatattgcagggctacaacttgataactatacagtacgcgagatgatcatgagagtcgacaggcgtatttcagagaagatatttactacaatagaggaagtgaatatggatacgctggcattggcggagtctgatgaagaggtgaagcaggcactggaggcatgcgattatactgtcattgcggatgaaggcatactaagggcggtatcggcagatactttgcagcgtcggcatgagatagaagatcatgacttcttttatgagctttttaagcggcttgagagaaatgataaaaaaatctttgtgattgcagagtcgcagaaagctgttgatgaggctgaggaatttctgattggattatttgacagagtgcgaatatccggcaagggtgttcttgacgactcaccgggatgcagcgaaaaccttgtcaatgaaattaacatcgtttcacctgatgtgattgcatcatttcttccgtctccggcacaggagaagttccttttacacaacagggaaaagctgttgatgaacctctggtacggaatcggaaataataagttcatggggaaaaagcatggatttattggaaaaataagaaaaatgcttgatgtgaagcgccttacgcatcttatcaacacctatgaacatagacaaaacagctcgatatagttaattcttataacaatagaagaaaaaataagaggaaatgtgtaaaaattgtacatttacctctttatttttttgtgcgaatgtattaaaataatagcaagtatttatgcaattagttataaagagactgtgagggcaatgcacagttacaaaaaggggagaaggagaacgatttatgatttccaatcagatacttcaaaatacaattgatggccttaaaggaattacgagaaccgatctttgtgtgatagatgtagagggcaagattcttgcagctacatttccgaacgcagaggcgtttatagagccggcacaggcctttgttgcatcaccggcagacagtcaggtgattaatggatgccagtttttcaaagtctttgatgatcaccagctggaatatgtgcttttagcgtatggtgacagcgaggatgtctatatgataggcaagattgcaagcttccagattcagaatcttctggttgcatacaaggagagatttgacaaggataattttataaagaatctgcttttggataatctccttctggttgatatatacaatcgcgcgaagaagcttcacattgatattgaagtgcgacgtgtagtatttattgttgagacaaacagggagaaggacggcaacgagcttgagaagatcagaagtcttttcggcggtaaatcaaaggattttgttacagctgttgacgagaagaatataatagtagtgaaggagctggcagaaaacgagacctatgatgatctcagaaagacagccgaggtgattttgaatctgttcagatccgaagcggatggggtgcatattgcatatggtactgttatcaatgagttgaaagaggtgtcgcgctcatataaggaggccaggatggctctcgatgtcggaaaaatctttttcgaggagaggaatattatagcatattcccagcttggaataggccgtctgatatatcagctcccgattcctctatgcaagatgtttatcaaagagatattcgatggcaaatcccctgacgattttgatgaagaaatattatctactataaataagttctttgagaatagcctgaatgtatctgagacttcaagacagctctacattcacagaaatactcttgtatatagattggacaagcttcagaaaagtacaggactcgaccttagagtgttcgaggatgccatcacatttaagattgcccttatggtagtcaaatatatgaaatatatggaatcaatggactattaaggagaaagtaatgattaaacttgaacatgtcagtaaggcatattctgcaggtatacctgctctcaatgatgtcaatctggagattgatgatggagagtttgttttcgtatgcggagatagcggatccggtaaatccactttgattaagcttcttttaaaggagcttgatcctacagacggaacgattactgttgacggaaggaatctggcgcgcattcgccacaagcaggttcctaaatacagaagaaatgttggagtcgttttccaggacttcagattattaaaggatagaaatgtttatgaaaatgtagcttttgcactcaaggttatcggtgcatccacggctgttattaagaaaaaggtgccacagatgctttctatggtagggcttgctgcaaagtacaagtcaaagccgagggagctttcgggaggagagcagcagagagtagctattgcaagagctcttgtcaatgagccgagcatgctgcttgctgacgagccgacgggtaatctggacaataacaatgcgtgggagattatgaaactgcttgaggaaatcaacgagaaaggcacaactgttatcgttgtaactcataatctggagattgttaaggttatgaaaaaacgtgttatcactataaagaaaggtcttgttgtatctgacagcaaggatggtgatagtgatgaggattaatacgttattttattcaattaagcagggatttaagaatattttcagaaacaagatgttttcactggcatccatagcgacaatggcagcctgtatttttatgtttggtctgttttatatagttgtgacgaacttctcaagcatggttaagacagctgaggagggtgttgctgtcacagtgttctttaatgagggcactacagaggatgtaataaaagcggacaaggctcagatagaaaagagggctgaggttggcaaggtggattatcagtcagcggccgatgcatggagtgattatcagaaggagtattttgagggctacgatgatgctgcagcttcctttggtgatgataaccctctcagtaattcggcaaatctgcaggtttatttgaatgatgtctctgcgcagcagactcttgtcaactatatcaaggggatggagggcgtcagaaaggtaaaccagtcgcaggatgtggccaatacactgaccgatttaaataagcttatcagctatgtatcgggaggtatcattctgattcttctgtgtgttgcgattttccttataagcaacacagttactacgggtattgcggtcagacgagaggaaatagctatcatgaagcttatcggagcgacggattttctggtcaggtctccgtttgtggtagaaggtattctcattggactgataggatcagcgattcctctgggattgctcagtgtcatgtatggaaggatttgtgcatatattgctaataagtttagttttataggaaatatgatgacatttatcccgacaaaggagattttctctacacttgtaccggtagcgcttatactgggcgttggaattggctttttgggaagccgattcacaattcggaaacatttaagagtataataattatgacggcctggctccgatcggagacaggctgttttaagttcatatcataatatagagaggacaggactgaaatggataattcaaacaacaacggcttagaatacgatgataattcagatatgagcgataaaaagcctcatagaaaaggctttagaaatgggttcggtgtcgggattgctacaggtatagtgaccaccattgtgcttggattgatcgtgctctttgcatacacaatgattacaggcaggagcgtgcataccgttgcaaaaagcgcagatgtgcttgatgacaagaccgtgcagaaaatcgatgagcttgcgaactacatagacgagtactactatgaggattacgataaggatgatttggaaaacggtctgctgcatggtgtgatggaggggctgaatgatccttattcggtttattataccgcagatgagtataaggaactgcaaatcagcacgacaggcacttattatggtatcggggctgcgttaaagcaggatcctgacacaaagcaggtgacagtttcgaaggtatacagtggtacaccttcggaggaagcgggacttaaaaaggatgacgaaatagtctctgttgatggtgtcgaggcaacatccgaggatctcacaaagcttgttgccaaaatcagaggtaaggagggcactaaggttacgcttgaaatcaggcgtggcgaggatacagacccatttaccgttgaggtggagcgtaaaaatgttgagctgccatcagtggacagcaagctgcttgacaatggagtaggatatatccaggtcagtgagtttcagacaaacacggcaagtcagtttgaggatgcacttgacggacttacaaatcagggtatgaagggccttatagtggatctgcgtgctaatccgggaggactacttaccgcagtgacagaaatggttgacagactgcttccggcagaaacagttggtaagcttcctgcaggaactgtcgtgtatacaaaggataaaaacggaaatatccagacatttggtgatgacgatggtaaacagattgactgtcctatcgtagtgcttgtcgatgaaaacagcgcaagtgcatctgaaatttttgcgggagccatgaaggattacaatgaggatggttatattgatgccacacttgtaggcaaaaagacctttggaaaaggaattgtacagactatctataatctttccgatggtgatgctgtaaagattaccacatcgaagtactacacaccaaatggtcacaatatccataaaaagggtatcgagcctgatgtagaggtcgattatgaatatacaggggatacaaatgcagactatgacatgcagtatgatgtgcagcttcagaaggcgattgaggtgatgaatgaaaagcttaaataagattgcatgctttctcatgctgtgctggatggtagttatctttatgttttcggcggagccggataccgagtcgtctgagctcagcggcagcgtcagctatcgcatagtttctgtggtcaataccattaccgcaagccactgggatgagaaggagctgctcgataaggcagagcttatagactatccggtgagaaaatgtgcccacatgagtgagtatgccattctcacattgcttggttttttgacattttcgttcttgtatggcagaagaagatttttgattccgataggcgtgaccttcctgtatgcctgcacagatgaatttcaccagctgttcgttcccggccgggccggcagattcacggacgtactgattgacaccacaggcggtataattatgctgctatttattgcgcttgttacacacgtagcacgtaagaagcatacagcaggagctgtgaaaacgaaaacatgaagacacgaagataagtgggctgtaatcgttgtcggtcgcactgttaggtgtgaacagtaacagtcatgataacaagcgtgatgataagcatgattataagtgccaaatttagttgcagttttctagtataatcggtataataatggtattgacgctggccaaaaaacaaggcatataacatacgcttttaatgtgtgccacaaccagcttcccgcccagtaaacctgggtttacggccggcacacagcatgttccgaagaaaaatatgaactgccacggggttccggaaaaaaatatgaatgaaacaaagtgaaaataaaaaatcactatccgaaaaaaatcccgtggctgacttcatatttttcagaggaatatactgtgtgccggccgcaccccacaacctgaatgcgggaagcgtagttagagccacaaagcgtctaaaatgtatagaaagaggtgattctgtggtagagttggataatttcaagtccacgctccaaggctacaaagccccactacaggaagtgagggattcactttgacctggctaataaagaagaaaaaatccaggaattagagcgagaaatggaagctcctgacttctgggatgacccggagaagtcacagagcaagatgaaagagcttaagagtatgaaggatgatgtagctacatacgcaaagctcaaggaacagtacgaagatatagagacgatgattgagatgggctatgaggagaacgatgagtcactcatacccgagatacagcagatgctttatgattttgagagcacatatgacggtatcagaatgaagactcttttgtcgggagaatatgataaatgcaatgcgattctgaggctcaatgcaggtgcaggtggtaccgagtcgtgtgactgggcggccatgctgtttcgtatgtactcgaagtgggctgacaaaaagggctttacccttgaggtactcgattcgcttgatggcgatgaagccggtatcaagtccattaccttccaggtaaacggagagaatgcatatgggtatctaaagtctgaaaagggtgtgcacaggcttgttcgtatttcgccgtttaatgcggcgggaaaaaggcagacctcattcgtatcatgtgatgtcatgcctgatattgaggaggatctcgatattgaggtgaaggacgaggatataagaattgatacctaccgctcaagtggagcaggaggacagcatatcaataaaacttcgtcagctatccgtatcacacattttccatcagggatcgtggtacagtgtcagaatgagcgttcacagcatatgaacaaggacaaagccatgcagatgttaaaggcaaagctgtatcttttaaagcaggaagagaatgctgcaaaggagacgggtatcagaggcgaggtcaaggaaattggctggggaagccagatacgttcgtatgtgcttcagccttacaccatggtcaaggatcacaggacagatgtggagaccggtaatgcggatgcggtgctcgatggcaatatagatatatttatcaatggttatctgaagtggcttgcaacacgttcggattaaggaggcaaatgtgggtttagttataactgtggcgatattagcagttctgacagctgccggagtgaccgtttacattaaagtcagacggttgtctgaaagtcttcttggtacacctgatgtcacagagggcatcaatcgtatcagggagaatgtctctacgactcccaagtcggtttcaggcatgacgcgccttatggagccacagataaaaagggattttccggagtttgtctgggaacagtttaagagaatgtcagaaagagtgcttgtgtcagcactttgtgcaatcacgactgaggatatttacaagctggaccgtgaggcttctgatgaggtaagacagcaggtgcaggtgcgtatagacagcaatgaagcagctggctttacagagcattttgacgagatcagggtgcatcagactgaaatctcaaactatgtgaaaagagatggaaggtgcgtcatcagtatacagagtgcggttgagtatttttactacaagactgcctcaggaaagcttatcagtggtgataaagagtataaaaagcagaccagatacaatatggagcttgtatacatacaggatatagatatgctggataatgcagggataggcagtgcagttggcactacatgtccgaattgcggtgctccggtcagaagtcttggagcaaagaaatgtgaatattgtggctcatatgttgagcctgtcaatataaaagtatggaagctgcagagctttcatgaagttgattacaaccatatctaaggaggaagaaaatgggaattattaaggcagtaaaacaggcgattggaggcggttttgcagatacatggcaggaggttattgagccggataatataggcgaccagacagtctatgccaggggtgtgctggtaaacagggggcagaataaaaaaggctctgacgatattgtttcaaacggctctatcattcatgtatatgacaatcagtttatgatacttgttgatggtggcaagattgtggattacacagctgaaccgggctactacaaggtgagcaattcatctatgccatcacttttcaacggacagtttggggattctttaaaggaaacctttgaccgtgtgagatttggtggacagacaccacagtcacagaaggtttattatatcaaccttcaggaaatcaagggaatcaagtttggtacgagaaatcctataaactactatgatacattttataatgcggagcttttccttcgtgcccatggtacatattccatcaaaattgtgaatccgcttcagttttatgcagaggctattccaaagaatatggatcatgtggagattactgatatcaatgagcagtatctgtcagagtttttagaggcattacagtctgccatcaaccagatgtcagcggatggtacaagaatctcattcgtcacaagcaaggcatctgagcttggaagatatatggcgaagtgtctcgatgaaagctggaatcagatgcgtggtatggaggtacaaagtgttggtatcgccagcctttcatatgatgagaagtctcaggagctcattaacacaagaaacgagggcgcaatgctctcagatccatctattgcacagggatatatggtcaaaaatatgtcagagggtgtcaagaatgcaggcagcaacagtggtggagctatgcagggcttcatgggtgtcggcatgggaatgagcaccatgggcaatatgatgaatggttttacacagatggcacaaaataaccggtcagccggaatgaatgctccgggaaatggtgcagcaggagtggcttcaggtgccacacagcaggaggatgcgtcaggctggacatgtgagtgcggacagaaaaacacaggtaaattctgtagtaattgcggcaagcctatgccacaggagattacagagtggacatgtgagtgtggacagaaaaatacaggtaaattctgcacaaactgtggcaagccattacctgtaaacacagagtggacatgtgagtgtggacaaaaaaatacaggtaaattctgcagtaattgtggaaaaccaagagcataagatgttgcaaagctgtaatctttgtgttaaaatctttgagtcaaggacaaatgtcggtgtgtgacaaacacacaccggccattttggaggtaactaaatggcggagaaatcaaactacttcgttttacgggcaaaggctgtaccggaggtgctgcttaaagtagttgaggcaaagagactgctggattcgggcaagcttgaatctgtgcaggaggcaacagatgctgttggcataagcagaagctccttttacaaatataaggatgatatttttcctttttatgaggggcgtaaaggaaagacagtgaatcttgtcattcagatggatgacgagcagggcatactttctgttgtgcttaagtcggtagccgatgcgaaagcaaatattcttaccatacaccaaagtgtaccggtaaatggcattgcgtcactcacgttatctgtggatgtatttcccgagtcggatgatgtggatgatatggcaaagcagattgagtccttaaagggcatacattacgtaaaaattttagccagggagtaacaaaaagatgaagattgcagttatgggttacggcacaattggatcaggtgtcgtagaagtattagaaatcaacaaggaaaaaatcgcaaagagagcaggagagccaatcgaggtcaagtatgtgcttgatttaagagagttcccgggtacacctattgagaacaaaatagttcatgattataaggttattgcagaggaccctgagatcggtatagttgtagagacaatgggaggcgttgagcctgcatttacattcgtaaaggcaatgcttgaggcaggaaaacaggtagcaacatcaaacaagaaccttgttgccgcaaagggggctgagctcatcaagattgccagggatcatggagtgaacttccagtttgaggccagtgtcggtggcggaatccctattatcagacctctcaacaagtgtctcacagcagatgagattgaggaaatcacaggtatcttaaacggaacaaccaactacatgcttacaaagatgacagaggaaggtgcagactttgatgaggtattaaaggatgctcaggataagggctatgcagagaaggatcctacagccgacatagagggacacgatccatgcagaaagatagctattctcacatcacttgttgcaggacagcaggtggatttcgaggatatccactgtgagggtatcacaaagattacacctgaggatattaagtacgcaaaggcaatgcaccgtgcaatcaagcttcttgcttcaagccgcaaggtaggtgacagctatacctgtctcgttgcgccgtatatgatagatgatacacatccgctctcaggagtaaatggagtgttcaacggcgtatttttacgtggaaatgtgctcggagatgctatgttctacggcagtggagcaggaaagcttccaacagcaagtgctgtagtggcagatgttgttgatatgacaaagcatcagaacacaaatatttatattgactggaagcctgagaagctcacacttgtaagctatgatgacagtgtaaacagcttctttgtgagaactgactcaccaaagagcgaggttgaggctgtattcggacatgtagactacattgagaatgtggttgacggcgagtatgcattcacaacaggcgacatgacagagaaggattttgccgacaaggcatcaaagataaacgttataaacagaatcagactgtaaaggtcaaaaatatggtaaaaggcttatacaccgctcacaccggtatggttaatgagatgaagcgcaattacaatatagtataataatgatatgaggggcaaaaggtattttgcccctcatttatgattaatcagattacgacatgcttgcatgtggttaccggcttttttagttcaaacttagcaattgcagatacgcatgctctggcgtataatatttaaaaaataaaactattcagaggcacaataaaaacacacagatacggagaagttcaattggaaaccgaaacagtcacaggatacgttgatcatataatatacagaaatgcagaaaacgggtatacggtacttgctcttgtagtgaacgaggaggagctcacatgtgtgggcactttttcggacattgctgagggggaaaatatagaggttcacggtgagtatacagagcatgccacctatggcagacagtttaaggtagtaagctttgaagagaaggagccggaggatgagatggctattgagaggtatctgggctcaggagccatacatggtataggacttgcgctcgcagcacgtattgtcaggcgcttcaagaaggataccttccgcatcatagaggaagagccggagaggcttgctgaggtaaagggcatcagccagagaaaggctatggagattgcggaccaggtcaatgcaaaaagagacttaagggaagccatgatttttttgcaacagtacggcatcaatatgaatctggctgtgaagatatataataagtatggcggagagatatacagtgtgctcaaagaaaatccgtaccgcatggcggatgatatcgacggagttggctttaaaactgcagatgagatagcggcgcgggttggcatcaagactgattctgattttagaataaaaagcggtatacagtatgttttgcagcaggctgccatggacggacacacatatctgccgatggaggagcttacgaggcgtgctgtatatctgctcggagtggaaagctcgcaggttgaggcacattacatgaatctggccatggacaggaagattgtcatgcagctaaaggatgatataacccagatttatgctaataccttttattatatggaggcaaacacggcagccatgctaaagcagcttgatgtgacgtatgatgtgccggatatcgagatagaggctgcaattagaaatatagagaaaaagacagagatggagctcgatgagcaccaggtcgaggcagtgaaggaagcagtcagaaatggccttttggtcattaccggaggacccggaacaggaaaaaccaccaccatcaacactattatcaagtattttgagctggagggcatggatatttttctggctgcaccgacaggccgtgcggcaaaacgcatgagtgagacaacaggctacgaagcgcgcacaatccaccgtatgcttgagttaaacggcggcatggacacaggaagctcagctggctttgagagaaatgaaaggaatccgctcgagacggatgtaatcatcatagatgagatgtcgatggttgatatatcactaatgtactcattgctaaaggcggttgtggcaggtacgagactcatacttgtaggagatgtgaaccagcttccgagcgtgggaccgggcagcgtgctaaaggatattattgattcaggtgctttccacacagtaaagcttacaaagatttttcgtcaggcgagcacgagcgatattatagtaaacgcccacaagataaataatggagaagaggtatcgttagataataagagcatggatttcttttttctaaagagatatgatgccgacaagataataaatgttacattacagctaataaagcagaagcttcctaagttcgtaaatgctacagagtatgatatacaggtgcttacgcctatgagaaaggggcttctcggagtggaacgtctaaacggtatattgcaggcgtatatgaatccggcagacaagagcaagcgcgaaaaagaatacaggggcacgattttccgcgagggcgacaaggtgatgcagataaagaacaactatcagatagagtgggaaatcaggacaaaattcggactttgtgtggataagggcatgggaatcttcaatggagatacaggtatcattgaggaaatcaacgattttgccgagaccatgaccatatcctttgacgagggcagaaaggtggagtatccgtttaagcttttggaggagcttgaacttgcatacgcggtcactatacacaagtcacagggaagtgagtatccggcggtcgttatacctcttttgagcggcccgagaatgcttatgaacagaaatttgctctatacggcggttacaagagcaaagaaatgtgttaccatagtgggtgacgaacagacattttacgagatgatacaaaacaactcacagcagagacgctatagcgggcttagagacagaatagtggaggagactatctgatgaaaataagaaaacttacaaatgaagagataaaaggggcatgtgcctttgcggtaagtatatacaatatcgcaatcagaggctgctttcggacacaggactgtcatcgatattttgatgaatatatggatgcagacaggctgacggacgaggaaaggaccggtgttcttgtagtgtttggtgcgtttgatagcaatgtgctgtgcggagtatgcggcatgacaaacgaggggcatatcaccatgctgtatgtacatccgcagtatttaagacgtggaattggcaaaaagcttctggagagagtcaggatatatgcgcgcatgcagcttaagctcatgcaggtgtctgtaaatgcaatgccggcatacacggcagactacttcaggtgtgtgggctttaagagtgcatatcagggaggcttttgcaatggacaaggcgatatgtacgttcctatgacagcaaaaagcatatatcaggtggagtatacaccgcgacatatagctgataagacttttattgcaatttcagttggcttcacatgtcttgtatttttctcaggcgtgatatatgcggtatgcgcggggcttactccgtaacgctcagatgcagttttaatgggctgcaatagttgccggtcatactttggtgtgaacagtaactaacattgtatacataaatatgcatatttatgtaacaaaaaacagttgaaaaatcggctgtattatgatacactttttacaatttaagcagatatactatgcaactacactttataagaaaaaagagacgccctctttttttttgcgcagacgtaaggttagttgcagctaagaagcttatggttacaaagtataacacgaaagggcagggtaaagatgaaagcatttttaattcttgaagatggtaatgtatttaccggaaccagcattggttcaacaagggaagtcattagtgagatagtatttaacacatcaatgacaggatatctggaggtacttacagatccttcctatgcaggacaggctgttgtaatgacttatccacttatcggaaattatggaatcacaccggatatggagtcagaaagaccatggccggatggatatatagtaagagagctgtcgcgtatgccaagtaatttccgctgcgagggtactatacaggatttccttaagaaaaacgatattccgggagtggccggcattgatacacgtgcgcttacaaagattctcagggaaaagggtactatgaacggaatgattaccacaaatgagaattataatctcgatgagattattccaaagctcaaggcatatactacaggcaatgtggttgacaaggtcacatgcactgagaaaaaggttttaaagggccaaggaaagagggttgccctcatggattttggcgccaaaaacaacatcgccaaatcactcaatgaaagaggctgtgaagttacaatttaccctgcacacacaaccgctgaagagatacttggtgacaatcctgacggaatcatgctctcaaacggacctggagatccaaaggagtgtgtagatattataaaggaaataaagaagctttatgacagcaatgtgccgatttttgcaatctgcctcggacatcagctcatggcacttgcaacaggcgcagatacacacaagatgaagtacggacacagaggtggaaatcatccggttaaggatcttgcaacaggccgtgtttatatttcttcccagaaccatggatatgtggtggacacagataaacttgaccctaatgtggctgagcctgcatttataaatgtcaacgacggcactaatgagggacttaagtatgtgaacaagaatatcttcacagttcagttccatccggaggcatgccctggaccacaggattcagcatatctttttgaccgctttattaacatgatgggaggtaaccagtaatgccaagaaataatgatattaaaaaagtattagttatcggttccggtccaatcgtaatcggacaggccgcagagtttgactatgcaggaacacaggcctgccgttccttaaaagaggagggcattgaggtatgtctggtaaactcaaacccggcaactatcatgactgataagcagattgcggatcaggtatatatagagccacttactcttgagtcattaaaagagattatcataaaagaaaagcctgacagcatccttcctacactcggtggacaggcaggactcaatcttggcatggagctcgctgagtgtggcttccttgatgagcagggagtaaagcttatcggaacaacagcagagaccatctttaaggctgaggaccgtcaggccttcaaggataccatggagaaaatcggtgaaccaatcgcggcttcacaggttgtaaagaatatcgaggatggtatcgcatttaccaacaagattggttaccctgtagttcttcgtcctgcatttacactcggcggttccggcggtggaattgctcacgatgagcaggagcttatcgacatactttcaaatggacttcgcctgtcacgtgtcggagaggttcttgtagagagatgtatcgcaggctggaaggaaatcgagtacgaggtaatgcgtgatgccaacggcaactgcatcacagtatgtaacatggaaaatatcgacccggtcggtgtgcatacaggagattcaatcgtagtagcaccttcgcagacacttggagataaagagtatcagatgcttcgtacatcagcactcaatatcatcaacgagcttcagattacaggaggctgtaacgtacagtatgccctcaatcctgactcattcgagtactgtgttatcgaggtaaacccacgagtttcacgttcatcagcactcgcatcaaaggctacaggatatcctatcgccaaggttacagccaagattgcactcggctatcacctcgatgagatcaagaacgctatcacacagaagacatacgcaagctttgagccaatgcttgattactgtgtagtcaagattccaagacttccgttcgacaagttcctcacagcaaagcgtacacttaccactcagatgaaggctaccggagaggtaatgagtatctgcaacaacttcgagggtgcccttatgaaggctatcagatctctcgagcagcatgttgattcacttatgtcttatgactttactggtcttacagatgatgagcttgagaaacagcttgcagttgttgacgacagacgtatctgggttatcgcagaggcgctccgccgtggagttaaatacgagcatattcacgagattactaagatagatctttggtttatcgataaaatcgcaatacttgttgagatggagaaccgtttaaagacagaggagcttacagttgacctgttaaaagaggcaaagcgtatcgagttccctgacaatgttatctcacagcttacagatattgatgaggctgatatcaagaagatgcgttacgacaacggcattgtggcagcctacaagatggttgatacctgtgccgcagagtttgaagcagagacaccatactactactcagtattcggcagcgagaatgaggcggcagagacaaatccacagaaaaaggtgcttgtacttggttcaggacctatccgtatcggacagggtgttgagtttgattactgttcagtccactgtacatggtcgtttgccaaggaaggctgggagacaatcatcgtaaacaacaaccctgagaccgtttcaactgactttgatattgctgacaagctctattttgagccactcacagcagaggatgttgagagcatcgttaatattgaaaagcctgacggagctgttgtacagttcggtggacagaccgccatcaagcttacagaggcacttatgaagatgggtgtcaagatacttggaacaaaggctgaggatgtagacgcagccgaggacagagagctcttcgacgagattcttcagaagacaggtatcccaagagcagcaggtggtacagtatttacagctgaggaggcaaagaaggtagcaaacgagatcggttaccctgtacttgtccgtccttcatacgtgcttggtggacagggcatgaagattgcatggaatgatgatgaaatcgaagagtttatcggcatcatcaacacaatcacacaggatcatccaatccttgtagataagtaccttatgggtaaggaaattgaggttgatgcaatctgtgacggtacagatatcctgattccgggtatcatggagcacatagagcgtacaggagtacactcaggagactctatctcagtttaccctgcacatactatctcagaaaaagcaaaagagactctggttgagtatacaaagagacttgcacaggcactccatgttgttggtatgattaatatccagtttatcgatatggacgacaacatctatgttatcgaggtaaacccacgttcttcaagaacagtgccatacatcagcaaggttacaggtattccgattgtagacctcgcagcaagaatcatcatgggtgagacaataaagggcatgggctacacacctggacttgctccgacagccgattacattgcaatcaagatgccggtattctcattcgagaagctgcgtggcgctgagatttcactcggacctgagatgaaatcaacaggagagtgtcttggaatagacaagaccttcaacggtgcgctttacaaggcatttgagggtgcgggagtcgagcttcctaagtacaagcagatgattatgactgtaaaggatgccgataagcctgaggcagtaggcgttgcaaagcgttttgagaagcttggctacaagatttatgctacaagaagtactgcaaagtacttacaggagcacggagtaaatgctcttcgtgtaaacaagatatcacaggagtctccaaacgtcatggatcttatccttggacacaagatagaccttgtaatcgatacacctacacagggtaacggagacaagacaagagacggcttccttatcagaagaaatgcaatcgagacaggtgtttactgtatcacggcaatggatacagccaatgcacttgcacatgcattagagactgcttctgacaagaagacaccggttgatattgcaacagttaagaatctttaaaaatatatagaatatattttatccccggacagtatagcggatatgctgcccggggattttttataaaatcaaaaatatgatgtgttatgcctgtatgcatgccgcaggttataatagcatcggtttttgttaatctgacggaatagtataagtaatacgtgtgaaaaatatgcaaagtttaatagaattttgacaaattattaacaaaaccaattgatttttacataaatttgtagtataatgactttgttaaaaaattaacagcacggatgtgcaatacaatttaaaggagataatataatggcaaagaaagttgtaatcgcaagtgcttgccgtacagcaatcggcaaaatgggcggagcattaagcaatactccagccgcagatttaggtgcaatcgtaattaaggaggctttaaaccgtgcaggtgttgctcctgagatggttgacgaggttaagatgggttgtgttatccaggcagctcagggacagaacgtagctcgtcaggcttctataaaggcaggacttccaatcgaggttccagctatcacaatcaatgttgtttgtggatcaggtcttaagtgcgtaaacgacgctgctacaatgatcaaggccggtgaggctgatatcgttgttgccggtggtatggagaacatgtcaatggctccttacgctatgacaaaggcacgtttcggatacagaatgaacaatgcaacaatcatcgatacaatggttaacgatgctcttacagatgcattcaaccactatcatatgatgatcacagctgagaatgtatgtgataaatacggcatcactcgtgaagagcttgatgagttctcagcaaactcacagcagaagtgtgaggcagctatcgcagcaggcaagttcgatgatgagatcgttcctgtacctgttaaggttaagaaagaaatcgttgagttcaaaaaggacgagggacctcgtgccggaacaacagtagagactctttctaagcttcgttgctgctcaggtaaagagggcggacttgttacagctggtaacgcatcaggaatcaatgatggtgctgcagcagtagttgtaatgagcgaagagaaagctaaggagctcggtgttaagccattagctacatgggtagcaggagcacttggcggagttgagcctgagatcatgggtgttggaccggtagcttctacaaagaaggttcttgcaaagacaggtcttacaattgatgatttcgatcttatcgaggcaaacgaggcatttgctgcacagtcaatcgctgtagcaagagatcttggtttcgatatgagcaaggtaaatgtaaacggtggtgctatcgcactcggacatcctgtaggagcttcaggctgtcgtatccttgttacattattacatgagatgcagaagagaggatctaacagaggtcttgcaacactttgtatcggtggtggaatgggatgttctactatcgttgagaagtactaattttctttgccaatagatatatgaggggatgcaggtgcatccccttgtagtgtgaattagtttattcacatcagtttatatatatatgattaagttatgctgcagaggcttagcacttaaagctttttgcaccataatatattttaggaggaattaaaatgaaggttggagttatcggtgctggtacaatgggccagggaatcgcaaaagcattcgcacaggtagatggatacgaggtagcactctgcgatattaagcaggagtgggccgaaggcggaaaagacaagattgcaaaaggatatgcaagacttgtagcaaaagaaaaaatgacacaggagaaggttgacggcattcttgcaagcatcactcctggtttaaaagaagatctctgcaaggattgtgacctcatcgttgaggctgctttcgaggatatgcaggttaagaaaactacattcgctgagttagacaagattgctaagccagagtgtattttcgcttcaaatacatcatcactttcaatcacagagattggaaacggacttacacgtccattaatcggtatgcacttcttcaaccctgctgaccgtatgaagttagtagaggttatcgcaggtgttaacacacctgttgagacagttgatgcaatcaagaagattgcagaggagatcggcaagacacctgtacaggttaacgaggctgccggtttcgtagtaaaccgtatccttatcccaatgatcaacgaggctgctttcatcaagatggagggcgtttcagatatcgccggaatcgatgcagctatgaagcttggtgctaaccatccaatgggaccattagagcttggagatttcatcggacttgatatctgccttgcaatcatggacgttctttacaatgagacaggtgacagcaagtatcgtgcatgtccactcattcgcaagatggtaagaggcggaaaccttggatgcaagagcggcaagggattctacgtttacaacgcagaccgcacaaagacacctgtagacgcacagtaggagcaataaagcctggtctcaaagcgtataaatgatgcaagcttgcttgcaaaaatttgtacgctttagagacgctaatggacatgagcaagaagcacggtagtgcggattgcgaatgtacataggattgcgggagcgaaagcgtagcaatccgtggactttatataacatatatacgttataaaatataggtcttatgtagcttatacataaactataaagttatataagaattcaataacaaaacaaaaatcaaggagaataaatcatggatttcactttagatcagaaacatgagatggctcgcgaccttttcaaacagttcgcagagacagaagttaaacctcttgcacaggagactgacgagacagaggtattcccagcagagacagttgctaagatgggaaaatatggattcatgggcattcctgtaccaaaggagtacggcggacagggctgtgatccacttacatacgttatgtgtgtagaagaattatcaaaggtttgtggtacaacaggcgttattgtatctgctcatacatcactttgtatcgatcctattatgacattcggtacagaggagcagaagaaaaaatatgttcctgaccttgcttcaggcaagaagatcggtgctttcggtcttactgagccgggcgctggtacagatgcacagggatgtcagacaaaggccgttttagacggagacgagtgggttcttaacggatctaagtgcttcatcacaaacggtaaggttgctgatgtttacatcatcatcgctattacaagcatcacagaggacaagcgtggacgtaagaagaagaacttctctgcattcatcgtagacaagggaacacctggattctcattcggaacaaaagagaagaagatgggtatccgcggatcatctacatacgagcttatcttcgaggatgcacgtattccaaaggatgcattacttggaaaagagggaagaggtttcccaatcgctatgcatacacttgatggtggacgtatcggaatcgctgctcaggcacttggtattgcagagggcgcattagagagaactatcgagtacacaaaggaaagaaagcagttcggccgttcaatcgcacagcagcagaatacacagttcaagcttgcagatatggctacacgtatcgatgcagctaagtatcttgtatacgcagcagctatgaagaaggcagagtttgctaagaaccctaaggtttcttactcagtagatgcagcaaaggctaaattattcgcagcagagacagctatggctgttacaacagagtgcgttcagttattcggtggatacggatatatccgtgagtacgatgtagagcgtatgatgcgtgatgctaagattacagagatctacgagggaacttcagaggttcagcgtatggttatttcaggctcattactcagatagttaagagagctatcataactgtagagctacttagaataaataaaggagaacaaatacatgaatatcgtagtatgtattaaacaggttcctgatacaaagggtggagtaaaattcaatcctgacggaacacttgatagagcttcaatgcttgcaatcatgaatccagatgacaaggctggtcttgaggcagcacttagaatcaaagacgagacaggcgcaaaggttacagtccttacaatgggacttccaaaggctgatgcaatccttcgtgaggcaatggctatgggcgctgatgatgcagttttagtaacagacagagtacttggtggagctgatacatgggctacatctactacaattgcaggtgcattaagaaatctcgattatgatttaatcatcacaggccgtcaggctatcgatggagatacagcacaggttggaccacagatcgcagttcatcttggacttcctgtaatctcatacgcagaggatatcaaggttgagggagattctgtagtcgttaagcgtcagtatgaggacagatatcacgtagttaaagctaagatgccttgtcttatcacagctctttcagagttaaatgagcctagatatatgacaccgggcggaatcttcgatgcatttgacaaagaggtaactgtctggggcagagctgaccttaaggatgttgacgattcagatcttggacttaagggatcacctacaaagattgctaaggcatctgacaaggtacctaagggagctggagaaaaggttaaccttgatccaacagagtcagtaaactatctcatggagaaattcaaagagaaacatatcatctagtatggaggaaccaaaaatgggtttagaagaatataagggcgtatatatctacgcacagcaggtagacaataagcttagcgacatcgcctttgagttagtcggtaaagctaaagagttagcagcagatttaaatacagaggttactgcagtacttcttggatctaacgtaaaggctcttgcaacagagctcggtgagtacggcgcagacaaggtaatcgttgtagacaatcctgcacttgagacatacagaacagagccatacgcacaggctcttgtatcagtaatcaacgagtacaagccggagatcatgttagttggtgcaacagctatcggacgtgacctcggaccaacagtttcagcaagagttaagacaggtcttacagctgactgtacaaagcttgagattggtgatttcccaatcaacgctatgcctggacaggagcagaagcacaaccagcttctcatgacacgtcctgcattcggtggaaacacaatcgcaacaatcgcttgtcctgacaaccgtccacagatggcaacagttcgtcctggtgttatgcagaagcttcctaaagaggctggcagagcagcagaggttatcgagttcaatcctgcactcgaggagaacaaccgttatgttgagatcatggatatcgttaaggcagttggcaacgtagagaacatcatggacgctaaggtacttgtatcaggcggacgtggagttggaagcgctgagaacttcgagatgcttcgtgaccttgcttcatgcttcaagggtggtatggtatcatgctctcgtgcagcagtagagaacggctggttagcacaggattatcaggtaggacagacaggaaagactgtacgtccacagatttacttcgcaatcggtatctcaggagccatccagcacgtagcaggtatggaggagtctgatctcatcatcgccatcaacaaggacgaggatgcaccaatcttcgatgtagctgattacggcttagtaggagatttaaagaagatcgttcctcagcttacagcagctcttaaagaggcaaatgctgacgcataataatgcaataaaattacattactaatacatttaaacacagtactgtttatcgcagtgctgtgtttttttgcgcataaatatagcgtaatttttgttatactacgacatctagtcgcatattataaatttacccccacatatatgaaaaattcggctaattttacaattgagtcatttatcccaatgtggtagaataacaacgttcaattaaaagtggaggaattggatttcgaaaagttaaaaactttagcgccatgcaccggcaggtacgtaaaaatgatgccggttaacgaggtttcaggttatcgaaaattcggcggatgcctggacgcatatatggatgcgtatctcgagccaaatatgatggagacatcaaaacaaagcgagagaaccataaaaatcaagtagctattcagtacagaacagttacatatttgtacatttaaaattatatatcgaaaaggagatctaacactatgtgtggaattataggatttacgggccgtttagaggctcagaagattttgacggaaggactcgcagcgttagagtatcgtggatacgacagtgcaggtattgcttatttcaaggatacaggcaagatttctattcgcaaaaccgtcggaaaggttaaggatcttctcgctatctgcgatgatgagaacaattcaacctgtggaatcggacatacaagatgggcaacacacggcggagttaccaatgccaatgctcatcctcacaaggttggaaatgtcgcactcatccacaatggtatcattgagaactaccacgagattgtaaacaagtatgatcttgcagactctcttatatctgagacagatacagaggtagcagcggctcttatcaacaagctctatgacggagatccaaaggctactattaagaaggcagtagcagagcttcagggttcatttgcgttctgtatcatgttcaaggatcagccgggaaagatttttgctgtcagaaatgtaagcccgatggttgcaacatattgcgatgatggagcatttattgcatcagatcttacagcgtttattaaatattcaaagcgctattttatacttccggagtacactatcatgacaatgactgctgatggaatcgaaatggaggatttagagggtaagaaagttgagccggattatcttgaggtaaactgggatgtgacggcagctcagaaggatggatatccgcatttcatgatcaaggaaattcatgagcagccaacagctatcacaaggactatcactccaagaatcaaggattcacttccttgttttgaggatgataatatcccggattcgttcttcgaggatataagcgacataacagttgtagcatgcggtacagccatgtatgctggaatggtcggaaaagctcttttaaagaacaagtttggtattcccgtttctgttgagattgcatcagagttcagatatgagcagcctgttctcacagacaggtcaatggttatttttgtgtcacagtcaggtgagacaatcgataccttagaggcacttcgtctggctaataagtatactaaaaagacgctttctatcgtaaatgtaaagggctcaacaatagcccgtgagagcaactatgtactttatacacacgcaggtcctgagattgctgttgcaagtacaaaggcatacacagttcaggtggcaagcttttacctgattggatgcaagcttggtcttgtatccggccgtatgaccaaggaagaggcaaagacatttattgagaatctgcaggaggttccaaatctcattgagtcagttatcacacaggcacctgagattgaacagcttacgaagagaatgacaaatgctgcaaatgcgttttacataggacgaggacttgattatgcattaagcatggagggcgcactcaagctcaaagagatttcatatattcatgctgaggcttatgcagcaggcgagttaaagcacggtacaatcgcgctcatcagcgagggggttccggttattgcagttgctacacagagccatgtatacagcaaggtcatctcaaatatccgcgaggtaaaggcgagaggcgcatacgttatccttcttagcaaggacaaggatattacagataagtcaatctgtgatgtgcatatctcactcccacaggcaccggatgagtttgtgattttcgagtcagttataatctgtcagcttatcgcttactacacatcaacaggaaagggcttaaaccctgaccagccacgtaaccttgcaaaatcagttacagtagaataaataatttccccggacatttatacgatgtccggggattttttttcacgcttgtgagatacaatgcagcatatgtaagacatagatgtatatgtcggtgattcgcactgcaccaacacattttattaaaaaattgttaaaaaaataacaaaaactgctttacacatttcttgcacggtggtatgatacataaatgcgggttactcatacgagaatccagcagccatacaattttcatgtgcgctcttatgccgtgtgacagaatcacagcataacagaattaggacgagacccatatgggcttttaccaaaaggatgaaaaacaatgcgcaattcaaaaacaaacgaacttgtactgacaggtttattcacagccattatcattatcatggcattcacaccactcggatatattccgctcgtagttatcaacgctacgattattcacattccggtaatccttggttcacttttctgcggacctaaaaagggagcattccttggatttgtattcggatttaccagttgtttaaaggcaactatagtcggaggaactctttcatcctttgtattttcgccggtgcttgccgcatccctggtcggaacctcaggtatatttaagagcttattcatagcatttgttccaagaattttagtaggtgttataccttattttgtatatataggcatcaaaaaggtgcttgcgtcagagaagaaaaatctctggggcacagttttaaatgtgctcatgtcagcattccttgcattcggagtatatgcattcctcggcaagatgtcagagtcactttcacaggcagccgctttaggaatcggcatagcagtcggagctgtagtatttatagtagttgaggctgtatttatcagaaagagcacacaggttattccgtttgtatatgcaggtgtagccggtgccatgaccaatacactgcttgtaatgggctcaatcttcgtgctttacaaggatgcttatgcagatgcaatcggtgtggcaggaaacgcggtgctgggtgttatcaccggagtcatcagctttaacggagtaattgaggcaatagttgccgcaatcatcgtataccttgttggattggttttaaatactatcaaaccaattgcagcaaaataaattcagatagatttaaaataaatgtgaaattgtatgtacggcggactgataaggtccgcctgttttataagcagttggactaggaatggtaaaaagcatttgagttaaaagaaaggcatgatacaaggtgaaacatatgcatgaaatagacataatggatatcggcggcttcaaaataggccaagccgaggacactaagggattgaccggctgtacggtatttctttttgataaacagtcaccggcgggagttgacataaggggaggcggaccggcttcgcgggagacaccacttttaaatcctgtggcagacgcaaagggtattcatgctcttgtactgtcaggcggctctgcctttggtctggatgcagcgggaggcgtgatgaagtatctcgaggagcgtgatataggctttgatgtgggagtcacaaaggtgcctcttgtggtgcagtcgtgcatttttgacctggtaataggtgataaaaatgcaaggcctgatggcaaaatggcatacaaggcttgtgagaacgcttcttatgatacctttttacagggaaattatggagccggaatgggcgcaacagtcggcaaatatatggggcgtgagcgtagcatgaagagcggaataggagcctatgcagtacagcttggagaactaaaggttggagcagtggtgacactgaacgcacttggtgacatatatgatatagatacagataagaaaattgccggagcactggatgaaaatgggctgctttttgatgacgagacagcgtattttgaggcagcggcgaagattcagaatatgtttacaggaaacaccacaattggtacaataataacaaatgcaaagcttgacaagaccgcactcaacaaggtggcatccatggctcacaatggctatggcagagcaatcagacccgtgcacacgatggcagacggagattcaatctatgctgtatcagtgggcagtgtgcctgcagatatcaatctggtggggccaatgagtgcctatgtcatggcaaaggccattgccaatgcagctagaagtgcaaagtctgtggatggctacaaagcattttgcgatgtaaacaaaaaatgactgcagaataataatagttttatacagaggtgaaaatcatgttaaaaggaaaaacagtagttttgggagtgacaggaagtatagcggcatacaagatagcaaaccttgcgagtatgcttgtaaaacagcacgccgatgtcaacgtcataatgacacacaatgcaacaaattttataaatccaatcacatttgaaactctcacaggcaacaagtgcctcgtggacacatttgacagaaactttgaattcaatgtagagcatgtggcgctcgcaaagagagcagacatctttatggtggcacctgcatcagccaatgtgataggcaagatggcaaacggaatcgcagacgatatgcttaccaccacaatacttgcagccaaatgtcctaagcttgtttctcctgccatgaacaccaatatgtacgagaacaggattgtgcaggacaatatcaaaaagctcgaacactacggctttgagatgataaagccggctgaaggatatcttgcatgcggagacacaggtgcaggaaaaatgccggagccacagacacttttcaactacataatgaggacaatagcctgtgaaaaggacctggcaggcaagaatgtactcatcacagccggagcgacgcaggaaaaaatagacccagtacgttttatcaccaatcactcaacaggcaagatggggcgtgccatagcagaaaactgtatgctccgcggtgcgcatgttacactggtcaacgcttcggtatctgttgagccacctatgtttgtagatgtggtaaatgtgacatcggccgcagacatggcagacgtggtgaaatcaaaggctgctgaacaggatattatcatcatgaccgcagcagtagcggatttttgcccatcacatccggctgatgagaaaataaagaaaaatgacagctcatatgagtctgtaattgagcttgagcgcacagaggacatactttcatacctcggagcacacaaggctaagggacagctcatatgcggtttttctatggaaacccagaatatgcttgaaaactcgaaagcaaagcttgcaaagaaaaatgcagatatgatagtggcaaacaacctaaaggtagcaggcgcaggctttggaacagataccaatgtggtcacactcatcacggctgacgactgcacagagcttgaaatcatggacaagagctgcgttgcagcaaggattatagaccggttgctgcagatgtagagcttcgattttaggttgagagtgggtgcgtggagcgggtggcgtacagattatatgtcacctgctcttataactccttagcctagtgggagtaaatgccgccatcagcagagcttattaggcgcgaaaaatcaaacgcgcattttacctcaatatataaattcaggttgtgctgcttgaacgagtattttccgcgccgcttttgctgatggcggcatataacttccacacggcacgtcgtaaatcgagcagatgacatataatctgtacgccacccactccacgcacctaatatacttttatgataaaatttaagaactacatctgcggtattgttacaccgcgcagtccactgccggcagctcccctgtcacatcgaggaagagatttgcaaaggtctgctcatagtaaggctccacccagagcaggccgatgccgagcgacagcacacaaagcacaagcataccgatgaagcttatgttaatgtagatgactctgagtatgttgccgcgaatcagttttatggcattagtcagacatgcaaatactgataaatcatcgcgagagagtaccagatacaggtaaaacgtaaacagaaccagtacaataaagctgagcacggcacttgcagcatataaagcgatagcaattcccatggtgtcgccgcttagcttgaaaaagtttctggctacaaggaaaggcgcctttgcaatcatggagatggcataatatatgatgtatgctccaaaatatctgttggagtgattcataaagcagtagaatacatcgctgatacggcactctttctttcttgccatattaaggtggaaacgtatgagtcccatctgcagcacgccgaccacgatagataaaagcacctcggcaatgtagtagatgacggtctgaacctttgtggcatatacatttccgagcaggtaggtaaacggcagatcgctaaacagatttatgagtgtgacagtgagaaaaacgctcatgctaagtctgtatcttccgttcaggttctctcttgatattctttttaattctttggatttcttttttggattcattatatttctcctgaaataatagttttgaattaatgcttaagttaggcttaaattaatgtttaaattaatgctttgacaattgtcagatatatagcatatacttgtattcatatggttacacaaaatcacaggaaggaccacacatatcatgcagacagatgaaacaatcgacaggtatttctatataacgggctggatatgcatagctatatttgcggctcttgcggcagtgattggagtatgcggtacgcagatactcacaaaggtgcctccatgcccgctgcacgcatatacaggctactattgtccggggtgcgggggcacgagagccacatttgcgctactacacggacatctgataaggtcgtttgtactccatccgtttgtgccgtatacagccgtttttggaggctggtttatgctgtcacagacactgcagcggataagccgcggcaggctgcacatcggaatgcacttcaggccattatatatgtggcttgcacttgccattattgtggtaaactgtatagtcaaaaatatgcttatattattttgcggtattcatctgcttaagtagctcattgtagtcgataccggtcaggttctggtattcctttaatataccctctatgcttccatattcgtgaagcatggcggcaaatgaaccgatatagataataagagtgataacaacagcggcaaacgcaatccagaatgaggtcatagccatgctgctcattgaggtggcaccgccttttgacagtaacgcaaaaatcatggcaagcgagccgcatatgatagacacataaatacagctgcacgacgcgatggcaattattgaaagcacaagtgctgcaacctccatattgcgtgagcgtttattgtagaaattgttgttgggattaaagcccggcccataattgctgccgaaattatagttataatcctgattataatcaaatttttgtggatccataatcaaattcctttctataaagttgattttattgtatcacttcatttataatacgaaaagaataagttttttaaagaggtaaaaaaatggatattattgctgcaattgcagaagaactgcagataaaaaaaggacaggccgaggccgctgtcaagctgatagatgagggaaataccatcccttttatcgccagataccgaaaggaggcaaccggctcattaaatgatgaggtgctcagaaatctcttcgacagactgacatatctacgtaatcttgaggacaagaagcagacagtgcttgcaagcattgaggagcagggcaagcttacggatgagcttaagaaggcaatccttgaggcacagacacaggtggcggttgacgatttgtacagaccttaccgtccgaagagaagaacccgtgccacaatcgcaaaggaaaagggcttagagccactggcacagaccattttagcgcaggaatcgtctgttgatatcatggcagaagcagctaaatatgtggatgcagaaaaggacgtggcagatgaagcggctgcacttgccggagcaaaggatatcattgcagagaacgtatccgacaatgccgattacagaacaaaaatcagagagcttaccatgcaaaagggacgtcttatatcgacagccaaggatccaaaggcagagtctgtctatgagatgtactatgaatttgatgaggctctttccaaggtggcaggtcacagaacactcgcaattaatcgtggtgagaaggaaaagatcctcacagtaaagatagaggcaccgacagaggatatcataaaatatcttaaaaagcaggttatcacaaatgatggagcgcctacagcagccgtactcacagaggtagtggaggatgcgtacgacaggcttattgcccctgccatagagcgtgaaatcagaaacaatctgacagaggaagcagaggatggtgccataaaggtattcggaaagaacttggagcagcttctcatgcagcctccaattgcaggacaggttgtgcttggatgggatccggcatttcgtacaggctgtaagatttctgtcgtagaccctacaggaaaggtgctcgataccacagtaatctacccgacagcaccacagaacaaggtcgaggaggcaaaggccgtaatcaaaaagctcatagacaagcatcatgtcactcttatctcactcggaaacggaacagcatcgcgtgagtcagagcaggtgattgttgagctgttaaaggaaattccggtaaatgtgcagtacatcatagtaaatgaagcaggtgcgtcagtatattcagccagcaagcttgccacggaggagtttccgaattttgatgtgggacaaagaagtgccacatccatggcgcgtagacttcaggatccgctcgctgagcttgtaaagattgatccaaagtcaatcggagtcggacagtatcagcacgatatgaaccagaaaaagctctcagaggcactcggaggagttgtagaggactgcgtaaataaggttggtgtagatttaaatacagcatcagtttcactgcttgagtacatatcaggcatctcaaagaccattgccaaaaacatcgtggactacagagaggaaaacggtaaattcacatcacgttcacagcttcttaaggtagcaaagcttggaccgaaggcatttgaacagtgtgcaggcttcatgcgtatctcagacggaaagaacccgcttgatgccacaggtgtgcaccctgagtcatatgatgccacaaaggcagtgcttgaaaagctcggctacaccatggaggatgtaaagaacagaaatgtagttggaatctcaaagaaggtatctgattacaaggcgctcgcagacgaggcaggagttggtgaaatcacactgcgtgacatcgttaaagagcttgaaaagccggcaagagacccgcgtgaggatatgccaaagccaattctaagaagcgatgtccttgagatgaaggacctcacaccgggtatggtattaaagggaacagtcagaaacgtaatagatttcggatgttttgtggatataggagtacatcaggatggacttgtgcatatctcagagatatgtgaccgctatatcaagcatccgcttgaggctgtcagtgtaggagacatagtagatgtgcaggttatgagcgttgacctcaaaaagcagcgcatccagcttaccatgaaaatcggacagggcacaaacaaggccggtaagtcagaacacggcggcagtggcaaaaacaatgtcgataacaaggctgacagaagtaatagaaataacggtggcaggaatagcagaaacgatagaaatagtacaggcagcaagaataataacaacagaaacaaaaaaccacactacataaagggcaagaaaaacaatttctttgacaatattatttttgataattaaaaacaccttgacaaaacaccataaagtgcatatcatgtgtttgtaagtaactattcagtacagaaatatgcggtaccgcatatttcgtaagaaaacgtatattatgtaggagcaagcgcccatcagcgtagctgattctaatgcgcttgcgactcgcaactgtgaaggtactgaacagttacgattgtaaaataaataggaattcttcagggcagggtgcaattccctaccggtggtacagcccacgagccgcaaggcatgattcggtgtgattccgaagccgacagtatagtctggatgagagaagattattaggtgtcattacactgtgatattaagtcccggaagattttcttccgggattttttaaatcagctattcagattttagatagctgcactcacaatatcctcaggattccttaagcatcaaaggagtgtaaaatggacgtaacaacaaacaacacaaaatcaaaagtaaacatcagacttttagtcggcacaggaatgttaagcggactcgcatttgtacttcagtatctcgagtttccaattccaatcatgccgggctttattaagtttgatttctcagatctgcctgcacttatcggcgcatttgcatatggaccgttagcaggagtgattgtagagtttatcaagaacctgcttcactgtacagtaacacagagctttacggtaggagagctttcaaactttattcttggagcagtatttacagcaacagcaggacttatctacaagaagaataagtcaaaaaagggtgcaataatcggcgctgtagtcggttcagtggtaatgggaatcgtcagcttcccgtcgaacctgtttatcgtgtatcctgcatacacaaagttcatgccaatggaagcaatcattggtgcctacagcgagcttctcccatcagtaggcaagctgtggcaggcacttttaatattcaatgttccgtttaccatcgtaaagggacttatatcaacacttatcacagtgcttatatacaagagactgtcaccggttttaaagggcagaggatagagaaaatacctgacacaatatatattagtcacaaacataaagagcgcagtcaattgcgctcttttctttttttaaaaggaatgttataataaatccaaatatttagttgggagcaggacatgaagcttgaatttgatgtaaaagtaacagaaaaagatttatattcatttaatatagagcaggcgtacaagggcagtcagggtgtcatatcattgctgtttgctgtgctcttggctgcggcagcagtgttaagcgcacaaaaaggcaatacggagtatgtggtgctttatattatagttggtattctggtgctgctatatgtgccgttttcactcaagggcagggtaaagatgattatgaagacaaatgaagttttctcaaagccactgcattttgagatagatgaaaagaacataaaagtaagccagggcgaggagatggcgcagcttccgtgggagcaggtgtacagattcgtggcaaatgataagaggatacttatattcagcaacaggaagaatgcatacattctctcaaaggagcagctgggcgacagctatgagccgttaaaggagctggcaggcagtacactggagaaatacagactgaaaatcaaataaacaaaatagatataagataaaagataaaataaatagataagggtataagctggtaatatgagtagtgaaggaaatataacagtaatagaaagcttttcggcagatgatacgcatgcacttggggttacgcttggacagcaggcaaagccgggggatgtgtgtacacttgtgggtgatttaggagtgggtaaaacagtgctcacgcagggcatagcagaggggcttggcatcacagagcctataaacagccctacatttacaatagtgcaggtgtacgaggatggcaggctgccgttttatcatttcgatgtatacaggattggtgacattgaggagatggatgaaataggctatgaggattatttctacggagatgggcttacgatgatagagtgggcaaatctcattgaggagatactcccaaagaagagaaaagagattactattgaaaaagacctggaaaaaggctttgactatagaaaaataacaataaaagaggttttataatgaagatacttgcgcttgacagctcagggcttgtggccagtgtggctgtcgtatcggacgataatctgataggagaatacacgataaattataaaaagacacattcgcagacgcttcttccgatgcttgatgaggtggctaagatgacagagcttgaccttaagactatagattttattgcagtctcagcaggaccgggatcgttcacagggcttcgcataggctctgcgacggcgaaggggcttgcaatggcactggataagcagatagtttctgtacctaccgtagatgcactagcatacaatctgtggggcagcgcagatgttgtgtgtccgcttatggatgcaagaagacagcagacctatacagggctgtatgattttaccgatggcaggatgaataccattttgccgcagtgcgtagtgatgatagaagagatagttgacaaaatcaatgagctcggccgcagggtgattttccttggagacggagtggatgtgttcagggattatattaatgagcacgtaaaggtggactatgactttgcacctgccatgtgcaataagcaaagagcatcggctgtagcatgtcttggacaggtgctctatgagcagggcagggcagaaaatgcagcagaccataagcctgagtatctcagattatcacaggcggagagagagagacaggaaaaggagagagattttagaatatgataataagacccatggagccggaggatgcagactcggtggcgcagatagaaaaagacagcttcacacagccctggggcagacagggatttttggatgccatgaggcttccggagaatatcatgcttgtggcacaggaggatggcgagatactggggtatcagtgcacgtatgtgtcatttgatgagggagagctgaccaatatagcagtcaaaaaatcagcacgaggaaaaggtgtgggtgcacatcttatcagatgcttgcaggaaaaggcaaaagagtcaggtgttgagcgcattgtgctcgaagccagggtgactaatgaggctgcgatatcactgtatcagaagatggggtttgtaaaccttggaatcagaaaaaatctatatgagcatccggtagaggacggtgtcatcatgtcctatactgcggaggaaaatttatgttagacgtgtgtttacttggaacagcaggcatgatgcctttgccaaacagatggcttacggcactttcactaaaatataacggcagcaatatacttattgactgcggtgagggaacgcagattgcgatgaaggaggccggaatcaatttcaagccgatagatattttgtgcatcacccactttcatgcagaccatatcagcggattgccggggcttcttcttacaatgggaaatgccgagcgcaccgagccgcttaccattattggacctaaggggcttacaagggttgtcactgcacttcggacgattgcgccggagctgccttttgagataaaatgcatagagctcaatgagcaggatgaatattttgagatgaacggatatcatatccatgcattccgcgtaaagcatgcggtgatgtgctatggctattcggttgagataaaacgtagtggcagattttccgtggaaagagcaaaggaaaaagaaattccgatgcgcctgtggaatcctcttcagaaaggcaataccgttgaatttgagggcagagtgtatactccggatatggtgctaggaccggcaagaaagggcataaaggtaacatattgtacggactcaaggccacttgagcacatagtggaggctgcagagggatcagacctttttatctgcgagggcatgtatgctgaaaaggaaaaaatagtaaaagcaaagcagtataagcatatgaccttttacgaggcagcagacatggcaaagagagccggcgtgaaggagctgtggcttacacatttttcgccgtcacttgtccatgcagaggattatatgccacaggtgagggatatttttgcaaacgcatatcttggaaaggatgcaaagagtgtggagctcatgtttgacgagcttgcagcaaataatccaaaggatacctacaaacaatctgtcacggcagattataagattgcggcagattctgatacggaaacagaatagagtaatataattaagattggtgtaataaaatgacagaaaatacagaaacaaaaaaagaaattaaaatacttgcaatcgaaagctcatgcgacgagactgcggcagcagttgtagtaaatggacgtgatctgcgaagtaatgtgatttcatcgcagatagctcttcatactttatatggaggggtagttccggagattgcctcaagaaagcatattgagaaaattaatcaggtcatagagcaggcactttcagatgcacatatgacactcgacgatatagacgcaataggcgtcacatatggtccggggctcgtaggagcactgcttgtaggcgtggcagaagcaaaggccatagcatatgcaagaaacattcctcttgtcggagtgcatcatatagagggacatatcagcgccaattatatagaaaataaagacttagagccgccatttctggcactcgtcgtatcaggaggacacacacatctggtgagagtggtagattacggcaaatatgagatcctcggacgtacgagggatgatgcggcaggagaggcctttgacaaggtagcgagagcaattggacttggctatccgggcggccctaagatagaaaaggtttcacatgagggtgacccgcacagcatagagttcccgagagcaaagattgttggtggagtctatgatttcagctttagcggacttaagtcggcagtactcaattatttaaacggctgtaggatgaagggactggaaataaaccgggcagacgtggcagcatcgttccagcaggcggttacagatgtgctggtcggacacgctgagaatgctattgatgagtttaaaatggacaaatttgctattgcgggaggcgttgcttctaatggtgttatccgtcatgcgatggaggaaatgtgtgcgcgcaagggtgttaaattctatcgtccgtcaccgatactgtgtacagacaatgctgctatgataggtgcggcagcatactatgattttatagcaggtaagaggtccggacttgatctgaatgcggttcccaatctaaagcttggtgagtgattctgtaattgcttccggttacaccggggtgcaaacataatgtgcagatttatcatggataggaaaataaaagaatatggataagaagaaatacacagcaatcatactgtcagccggtacaggaagccggatgaaaagtaatatgccaaagcagtatatggagcttttggggcagcctgtgatttattatagtataaaagcatttgaggatagtccggtggatgaaatagttatagtctgcagtgcggattatattgagtatttcagacattcgataatcgaaaaatatggctttaagaaggtgaaagcaatagtgcaggggggtaaagagcgctacaactctgtatatgaggggcttaaagcagcaaacggcacggactatgtgctgatccatgacggcgcacgccctctggtggataatgaaataatagtccgttctatgcatacggttgaaaaagaaaaagcatgtgtagcaggaatgcctgtaaaggacacaataaaggtgtcagatgaattgggatattcagaaaatactcctgacaggaaaagcctgtggcagattcagacaccgcaatgctttgaatatgatttgctggctcagtcctatgataagctgtttagtgacatgtcatatgggaaaagtgtgccggcaattacggatgatgcaatgatagtcgagtatgggagtgacacaaaagtaaagctcatagaaggctcgtatgaaaatataaaggtcacaactcctgaagatatggggattgcagaactttttttaaagaaacgcagaaaaatgtaaaaaaaatagaaattagtgttgacatattgtaacattgatgataatataaatcctgcgctgaacaagtgcagacaactaaacaattacgtgttaattgtgacacgcaggggtatcgaagtggtcataacgaggcggtcttgaaaaccgtttgtccgcaagggcgcgtgggttcgaatcccaccccctgcgctttcttttgccttaaaacagagatgcaaaagaaaatgaaaaaagttcttgacaaatgcaaaacattttgatagaataaacaagctgtcgcaagacagagaacttaaaacagagttcaaaaaaataaaaaagtgcttgacaaacgaacagcgatttgataaaataaataagctgtcgcaagagagcaaaacagtccgttccgttacttccccctgtgcttcattgtccgttccggcggaagaaagtaaagggtggtctgcgaccattttttatctgctgcattcgctgatcggcaagccgaagctcatactgcagataaaaaacaagcccttgactgtctccctcctacacttccaaagtcgcccaagaggaagtaagctccactatattcttggcagaatatacgcacgaatatatccgcttgatatagggtgtctatcatgctataatatgtgtagcggatatattgcaagttccctaaagtgttaccactttagaacttgtgagggtggcaagccccccttcaatcccccttttaagcgagccgacaggctcattatgcggtggtgctaccaccgagaaagtgaggtcagcatggataagaaatatatcgaaaatcagtatcgtctagcggtgttggacttccagaccgcccggaacgaagatgaacagtgggaagcaagaaagactatggcaaggctggagcagatagccgcacaggaatacggttttgaatacgcagatgaactgcacgaaaaagaaatagggaggaaaggactatgaaagttggaaagttccagattggaagataccatgccatcatcagaaagagctatgcggacggaagcgtggactatgaaacgtccttttccgaccatgccgatttaatggaaagtgtgtactgtctgaggttgtgtatcgggaaaatggtagggattgctacagataccccgaaagtccttactggggtgcaggttatccggggaaaggagaacattgtccgggaactggagggaaagcagccatgaataagacaagacctaaacaattatcattccgggtaagtgaagaagaataccagcagttgcagcagaagattttagagagtggaaagaaccaacaggagtatatcctttcctgcgtgctggagaagcagatcgtgaatatggacggtatcaaggaacttatcccggaactgaaacggatagggaacaacctcaaccagatagcaaagcggtgtaatgaggggggaatgttgccgagtgaagcggaagtgcggaagcatggagaggagctgaacaaagtatggcagtcattaaggcagtatcttcaaaggcgggcatagggcacgcaatagattatgtgacgaaaaaagaaaagacagaggagaagcttgtcagcggtctacattgtgagccggagacggtcaaggaagaaatgcaagctacaaaggagctgtggggcaagacggacggaagaacctataagcattatgtgcaatcctaccatgaggacgagaaaataaccccggagcaggctcacaagaacgctgtcgaactggcagagcatacaaaggcatggaaagggcatgaagtactgatagccacgcatatagacaaggggcatatacacacgcactttattgtcaattccgtaaattatgagaacggtcataagctccaatggagtaagcacgaccttaaagacctaaaggaacggtgcaacgagcagagtcgggaacagggcttgcatgtgccggagaaaggaaagacatttgctggagaagttcgggaagaaacggtggcatggagcaaagacacctaccagcttttgaaacaggcagagcaggggaatgtcaaaagttatgtgcaggatattgcccttgcggtgctggattgtaaggaaacagcgaccagccgggaaacatttatccggctgatgaatgaaagagggtacggggtggactggcaggacagccataagtacatcacatataccgacttagccaggggacaggcaggagaaaaggcttgtaaaatcagggataataagctggaaaaatactacaatatggatttcggaaaggagagtatggagcatgagtttgagagaaatgcacgaacagcagaagcagagcagtccaagagagcagcttcaagagttaaaccgacagagccggacagagctggaaaacagtctgctcaaagaagcgttggcgatgtcgagcgagaactgcgaggaattgatgaagcagtcaaatcaagaacaagtaagggcagagcggaacaggcagagagacgcagagcagaacaggaagctcatcagcgagctgaagcagagcgtagagctactgaagaacagcaacgaattgcttcaagacgctatatcgggcgaggttgggagtttgaaagatgaggttaaggaaaataccgtccaagaggttagaaaggcattacaggcgaatatagaggctatacagagggctacaaagcttcttgagaagcagtctgatacacttacgagcgtgatgaagcagaagatccgggagctggaggaaagcaaaaacagctttttcagatatgagggtttgaaactgtacttgttttggggcggtatggtctgtaatattttagtatttcttatgctagcgtctagcatgtttggtaggtgaaaatatatctagttagataaaaaaaggtaaaaaaacctattgataagattagcggtcaaggcgagagggagtgaggggtaagtattgacaccaaaaaggcactcccttataattaacgaaaaaaggtaaaaaaacctattgataagattagcggtcaaggcgagagggagtgagggggaaaagactatggcaaaatataccaaaaggagagataaaagaaggtatgagtggaagtctgcttatcgggagaaagaagcccttatgttggagaggggatacccggaagtaagtcctcatgatttctatcgggagttgtttccggctggcagtctccagcaagagccggaggacggaaaaggcaatattatagcgacacagattagaccgtccggcaaaggaagaacccggcaatgggtaattgatgatagtctgaaaatgctggataaggtcataggggataggtttgggctgataccgcctattagtttttacggaaagtcacacacgaaagagaacgctcatgagctgtttgcggtggtggtggatgtggactatgtaggtaaacagcagttaaagaacctgttgaagcagtttgggaatggcgtacagcttcgtccgacttatcttgtcagctccggcaagggcgtacatctttactatttcttgcaggagccggttcagttgtatcgaaaccgggaagaagtgcttgcagagctaaaagaagctcttatccggcggctatggaatgataccagctctattcgtccggacagcccggatataaccggcatttatcaaggttttcggtgtgtgggcagtcagtcgaagctgggggcagattttccagtaaaagcctataagttgtcagagaaccgttacacgctggaggatataaaagccagcataccgagttgtaaggttgactttgctccgttgtacgagaagccgagaagaaaaagcaccgttacgctggaagaagcaaaggagttgtacccggattggtatgagaagcggatcgtgcagggagagccgaagcagaaaagtaaaaagcagggcggtacgtgggtgtgtaacgaagctttatatgagtggtggaaacggaaaataacagaggaagtaaaagccggaggacgttacttttccattatggcattatgctcttatggcttgaagtgtggtgtgtcggagtataggataagacgagatgcctatgcgtttttagagcatttagagagtctaaccgaggacgaggacaaccatttcagcagggcagatgtgaaggacgctctccgagcattaaaaggggatagaaaaaggctttcaacgatagcaagccgggaatggatagaggataacacaaaggttacgataccagcaaataagcggaattacagaaaacaagaagcccatttatatcttgctaggcgaaaaaaagaggatatgaaagtcataggcgaagtagtaaatgagggtagaccaactgcagagcaaacggtcagagaatggcaggagagccacccggcaggaaagaaagcggactgcatacgggaaacaggattgagcaagcccaccgtttacaagtggtggaagtagggaatacttgaaatggctatctgaatatgctataatggcgatagctaaaaaggatatggtaccacgagtacacaaagtgaaagccccggaggtgacgctccggggctttctttaggttagttgtcactgtcgtttccgtctaaccatttgcagatgtagtagctggttacgcctgccataacggaaaccaaaaaggatataataatttccacgagtacaccccctttctgttgccagattgggtgcgacaacgttgaatattatatcatatactgatagtgtattacaatttaattctctaatttaatgtatcaaggaaataataagaacagcttgtcttatttgtgaaaattatgatataattgctataaatcttagtgcaaagtgggatggtgtaatgaaaagaaaagttattgtcagcataacttttgtagtattgctatgtagtattgttttgtgcgtgataaatcaaaaaaaagctccatttattgaaggtgtcattgttgaaaaaaacgagcgattttttaccatagaaacggatatacaagaaaaaatagtctgtactttgccaaaagaatatgattatcaagatatatcgctgggagataacataagagtgtattataaaggcgaaattttagaaacaagtcctgcacgaataaagaatgtaaaagaaattaaaaaaatataatatccttgcaaacggaaaggagtgaatatgaagaaaaataagattgtgaataaaataggcattttagttttagcagtaatgcttagtatcttatcttcaattacggtgttagcgagtgaaccagaagaagcagaattaggaccacgtcaagacataagcaaaaatttaacaaccggtgaaattacagtaaacgagattcctgccaatcttaacaaaaatagtagtgatgttatggagccatttattccggaaggaatgaaagttgatcctacgacaagggaagttataggtccagacaacagatataggataacagatactactgcatatcctaattctgcaatttgttatatggaaatgaagtttcctgatgacgatggtttatatgtcggaacagcatggatgtatggagaacgtgttgcaatgacagcaggacattgtgtttatgatgcaagtttaggcggttgggcagaatgggttagaatttatccgggaagtaatggtggaacatcaccttatggggtacattatgcctcagtgttacatactgatacaaaatatatagaatctgaaaattctaattatgattggggattattagaatttagttctgatataggtagttcaacgggatactttggtgcttcatggacaacatcaagtttagttggaacgggtattgttgtaaggggatatcctgtagaaaaaaatgctcaaatgtggtcaatgtctggaagcattgcagcaagcggtacattcaaattaagttactatattgatacaacaggtggtcaaagcggatcgccggtatataaaaatgatggaaattataggtgtgttggtattcatacaaattacaattcgcttggatataatcaagcagaaaggatcgatgaatcattatttgatattatgaatcagtatagataatttttagagttaatgtttgcaaggatattttttggattttatgattatgaacaaaggtaataaataaaattttctacgcagatgtagtgggcgactatattggcatagacagagaggaaaaagacaaaaatgtatttatattggcagaaatgccacaagaagccatttccccttgtttattgtcagagccataaggaaaagagtgtcaagggcggtcgaaagaccgcagagtttccccttgatactctttttttgttggatatcatgtcggaggggaaaatggctgtcagtccgttccgttacttccccctgtgcttcattgtccgttccggcggaagaaagtaaagggtggtctgcgaccattttttattaataaaaaataattgtatttttatattattatagtataaataaccataaaactcaatatttaattagcaaatccactaagtatttcattcatgaagctataaagatcctttttaccatctgccttgtaaactatgcttatgatgcgctcatttttagcattctggcttagcagtacgaggcaatagccggcttcacccgtagtgcctgtctttcctcctgtcactgtgacgttttcaggagctgtatatgctccggtcagatagccgcaggtattcttaaaggtctttgaaacagccacgccctgggaatttgtatatgccacatcatgagtctgtgaactgatgattgcaacaaagctctctaaggatatggcattggaaaaaatgaggtacatgtcatatatggtagtgtaatgattttcatcaggaagaccacttgggttgacaaaattgctgtttgtggcaccaaaactttttgcagtgctgttcatcagcttggcaaattcttctacagaaccactgcagtactctgccagtgctattgccgcatcattgccactctcaagtaagagcccatacaataagtcctgcactgtaatgacatcgccctcctttaggccacataccgatgatgaatgacccgggtttgcagcgtcatggcttactgtgactgttgcatttaaatcacagtttttaagaattatgtatgcggttaaaatctttgtagtgcttgcaggatagagcttttcaaacagattctggctatacagcacctgatgagtgtctatattaaaggctccggctccctctgcggtttttgcaaactgcatattgtcctgaccaaaattgacatcatttgtgacgcaaaggttggacgcaaaataattacttccgttgtatccatttatataatcggtggaataagtatcatatgcattctcaatctttgtaccacagccggtcataaaaaccgccgctatgcatgtcagacatagcagtcgtttaattctttgtttacttgtacatctcacgccagtcaagatctcctctgtccaatgataaaatgagcagctctgctgtagccagattggtggcaagtggtatattatgctcatcacaaatacggaaaatactgtttacctcaggctcgtgtggcttaggctttaatggatcacgcagaaagatgacaagatctatgtcattgtgctcaatctgtgctccaagctgctggatgcctcctaagtgtcctgcaagatatttgtgtactgagaggtttgcaacctcctctatcagacgtcctgtggtgcctgtggcgtataaattatttttgcttaagatacctctgtatgctatgcagaagttctgcatcagttttttctttgaatcatgtgcaactaatcctatgttcattgctaacctccctatgaatatttcttcggctgtaatccaacattcaggacaattcccattcccatgtacagtgaaacaagtgacgtaagtccataactgacaaatggaagagtcataccggtattgggcataagacctgtggctacgcacaaattgataaaggcctgaaagcctataagtgctcccatgccacagcatatgagctttccgcttgtgtcctttgccttccttgctataagtatacactcaattacgataagaagcaaaagaattattatactgattgtaccaataaagccaagctcctctccggcaacagcaaatataaaatctgtttgaggctctatgatgtagttggtgttcttcatagaggttacaacagagttgttaagtcccttgccaaacaactgtcctgagcctatagcccagatagagttcctttgctgtgctgctgtatcagcgtaatttgttgggtcaagccacgacattatacgtgtagcagggtaaaagccttttttgatgagtgcatcggcatgtgtatatatatagcttatcactatcaaaactatcggtactgaaactccaagtaccggcattattattttataacttaatccgctaataaacaagagggtagcgaaaattaatgcagtaagaattgtcgttgagttgtccggctgctttaagataaggaataaagggataccggcaaaaattacagataataccagagtccttactgtgtttatactatcctcaaacctggaaaagaaataagcaaaaaacaaaataagtataattttcgcaatctctgacggctggaatctgatacctgcgatctcaaaccagcgctgtgcaccctttgcatcatcacctgcaaatagaacaagtaacaacagcacaatcattccggcatagtatatccacacgaatttgagcagaaatgtgtaatctataagggaaagcactatcataatagtcagtcccattacaaagcctattatctgcttgctttgtacggagtgcttggcactgcctatcagcaggatgcctataatcgacaaagctattatgtatactactaattgaaagtgataattctttagtctgtactgtttgagcattttgttacttcctatctgttatctttgtaatcttaattctaatactaatgacatgatggtcaaaaggtattttgttaaaggttattaattgattttttgtcgcgcatgataatccggacctcgtaagcttcatcgtttatattcatatgtctttgtatcacgctttttatttcttttttaatctgtgtcatattgtcagaagcagatattgtgctcctatcttctgcaagtgctattttaagccttttcttggcgtattctcctgttttggaaaatttatgcatcatacagcggcacctctcatatcgtcagaggaatggattatctgaccggatatccgggcaaatacaggaccaagcctgcttttggcctcacggacaggtattcctctgttctggcaaatgataacacttttgtcatagggaatagtgccgataatcctggtagaaagaagtgctgtaatatcattatcggatatcatctgatgccttcttaccatatgcttgtcatatgcattaacaatgactgatatatcgtcaagatgtgcgctgtcgagcaggcttatgcatcgccttgcatcgtgtatggcagatacatgcggtgtggtaactactatcgcacggtctgcaggtgagactgaaaaccaaaagccgctgtcgatacccgccggagaatctataagacaataatcaaagcttgctttaagctcctctataagtatcttgaagcgtgcctcatagctgcatagcgtatccatggaaggtgctgcaggaattacatatagattgggatactttttattgcgtatgattgcctgtctgatacggcatgagcgttttaagatgtcgaggatattgtaattgaccttgtcctctattcccattaccaggtccagattgcgaagtcccatgtctgtatcgagcatgatgacttttttatctaactgtgaaagttcaactccgatattggaaataaccgtagtttttccaacaccgccttttcctgaagtgaaaactattgcttcactcacaaaaataaacctcctagtctgttctggcacttgagcctgatgagtttacaccctcagccttgactgcgagtaaattgtcaagtgactccagattataataatatgaaattatatttctggatgcagctgcagcattgtgtgagctgtatccatatgatatacgtgtagctattgtaatttcaggattgcttgatggagcgtatcctacaaacagtgcatggtttggtcttgtctcaacctgctgtgctgttcctgtcttaccggacacctcaacgcctgtaaagccgccaaatacatcgtgcaggtcttcgaccaccatacgcattccctgatggatggcatcccactggctttgagtgagtgtgcctgatatatcggttgattttgaatcatactgtttgactgttttgccgtctgcatccacaattttgttcatcagcttatagtcataaagctttccggaagcaactgctgtcacatatcttgaaagagaaatagtcgtaaagttgttattactctgtccgatagctgccataacaggatactgtgtggcaatggacggcgtcttttctactatctcaacacctgatttctggtccagtccgtatatagatgcatatttttgtatgtatttcataccgttttcatcgtcatatgaaccggtgtccttgcttgcaagcctgaagcctgttgtgtagaagaatacgttacatgaatcccttaaagcttcagatacattgtccataccatgcgctccaggataaatccagcattttggctgattgctgatttctgtaaatattccggtacaattaatctttgacgaagtatcaatgactccctcggcaagacctgcggtgcttgataccatcttgaaggtagatcccggtgcagtctgctcctgggttgcataattccatagcggattagacttgtcctctctgagagactggtagtaatcagcatctacagtgtttgcaagcttgttgttgtcatagcccggatagctgactaaagcctttagctgtcctgtctttacatcagttatgacacaggagcctgtacatgggtcaagggcaagctgtgcaggtgttatctctatattgtttattttgtccataagaaatgcatatggactaatggagccattagcaatgttgcttactgttgcatcgtcataatcgagtacaccctggtcaaaaagcagaaggcacagctgctgtccagtgaccgccccggaatttaccatatatttgtatataattttggcaaagtctttattgtcagtcatggcatccttgatatacgagcagagtgctgtgtaaatctcgcttgaatcagcatacttctggtccacatcaagctttgtgatgtctatccactgctttgaaatgcagtatttgagataatcacgcggtgagagtgtgccagccttccatgaggcatatgtggaatcagaggtatctatctgtttgctcaacagcagtccatcatcgtttagcactgacataacacatgtaaaataatcaagtgtctgctccgacatggaagcagtgcctgaggtaccactttcaagctctctgtcaatagtggataatgcatcctgcagctgaccgctgaaggaattatatatagcctgctcagttgctgatgcatctgatgcattgaaatgtgtcaggtcaattacattgttgttgatcagtgcaaagtaaacatcacttataggtatttcacctgattttattttggagtaaacaattccggctatctcctgctctaacagcttgtatgtggcctcctgcagcttgatgtcaatacttaagtagacatcatttccggaaacaggattcttctgacttattacctcgtttatcttaccgacattgtttacatagacctgtttttcaccgtttttgcctcgcagatagctctcatagtactgctctaagcctgacttacctaccatatcattttgtgtatatgagtcatcatcctttgacagctcattatactcgtcggtagatatcttgcctgtatatcctatgagcgatgaaatatattcaggatagttgtacttgcggatggtatcctcttcaattgatatgccggtaagagtatctgaatgctcgttgacatatgctactatcgaatcatttacatcctttgctatagtagtggttttgtatttagtgaatcggttttgttttatggcatatctcatcactacaatatcataagtggcctgtgtatcatacttgctgcttatatcaaagcattcattctggtcagagcttagaaaatcaataatattctgggcgctggcatttgcctcgtcaaatccaagtgctttattgtattcgagcttatcatatttctttccgaacacatctgacagaaatctcttttttgaggtttcagatgtgaatgtaaagctgtatgtaccatcatcgtttaaaacaaccggaaaatcattatatatggagccgccattgttttttattacattgataatttcattaagctctttgtttaaaagacgattgtgctccttcgtagatgaatagctgccgttgtctgagatgactacagagtatgcaagctgattgtaagcaagcagctcaccatttacatcgtatatattgcctcttgatgcctctatggacagcggctttttaatcagcattatgaagtttttctgataatctgcacctttaataatctgaagggtaaagactctttcggcaagcaggacaaacatgagaataattactgctgccaatacaaaaagtcttgagctgaaaaatttcttcagaaaatcttttatatcataaatcaaatttctttgctctccttttctcgtatgcttccagcttctggtttaccttaagaaataccagatacaaaagtatactgataaccattgtgtatacaaattcaggtatgataattgacttcagatagtacaaaaagctaaatctgccacgcagtaaaaacatgaaaaagtatactaccagattgtaaaacaaatcgctgcctcctatcagaagcataggaagctttatatcgtcaggatagaatcttttctggaataatccattgataaaaccgatatacatatatattaaagcatacagtcctatataatttccgcaaaatatgtcaataagcaggccgcaaaagaagcctacccacagtccttcctttttgccacgcataaagccaaaggatgatacggctataatcaacaggtttggtgagatattggcaaaggaaagagtcttaaacagcgtggtctgtaatacaaagcataaagttattattataaataaaacaattctacgtctcatgctgctccttacttattttcagttgaattttcagtctggctgtcaccggctgtttctgcactttcggtgttgtcagctgtcttagtgtcaccggtctgcttaagctgtgttatgaccatgacattttcgatatgctcaaaatctacaaccggtgtgatagtgccggattttgtcagattgttggaattattttcgatttttgtcacatagccaatcagtatgccctgctggtaacggtctgacacgtatgaggtaacaacaggatcgccctctttcaccttgttgtcatcatcctttaactccgtaaaggtaattaccttgtcatcgttcatggtttttatattgccactgacggtgagattgtcctccgtggtggaaaccatgccactgactttgctggcatcatctatgatacagcgtaccttggcaaaattatcgccagcatcggtaacaatacctacaagtccgcttcctgcaagcacattcatgcctacgtccactccatctttttttcctttgtcgatagtaaaggtagaaaaccagtttccgctgtcctttgctatgacactggcagcgaccttgggatatgatggatatttggcatccaaatcaagaagctgtctgtaattgtcaagctcatactgttcaagtttgttggttgtgagctgtgttgtgagctcttctacctcggccttgagctttttattctcagccttgacattttttaatgtacgtatttctgtaaccttatctgaaatgtggattccaaagctgtttatacccttctgcattgggatgaatacatatccggcaacagtctttaaaggaccaccggaaatatttaaggtaaggcttagcagcatggtcacaaagcagactgctgtcataatcaacagtgtgtatcttgcaggaagctttttattgtgctttctctttcgattgcgaaaattcttactcatattaacctcggttattattttttgatgctgaacggaagtctcttatattttgaatcagaaactatttgtacgagcccgcgtactgcactttcctcaggacattctgagcagatgacctttatacctgtaatctgttcaaagagctggtcaagtcctgcaagctgtgagccgcctcctgtgatataaatgcctgaatggatgatatcctttgcaagctcaggcggagtcttctcaagaatcatttttattgatgtgcatatagactcaaggtttgacttcatagcctcgtaaacgatctttgaaccaatttccatctcaataggcaggccgcttaccacatcacgtcccactacgaccatactgtcctctcttcccggaagtgcagagcctatagtctccttcaacagctttgcagtcttttgtccgattacaagattgaactcctttcgcacaaaggagataattgactcgtcaagtctgttgccaccgaaatgaagcaggtcactaagcaccaggccaccgagtgaaataacggatgtctctgttgtgtcagcgcccatatctactatcatgacaccggttggctcgtttacatctattccaagacctacagcatcagcgataggcttctcacagagcatgacctttttaggctttgatttgctcttatagaagagctcgtagaatgctcttttctctacatctgtgatatctgtcggcacagcgatgatgaactcggcatttttgatacgtgcctttgtcttgtgctccaaaaagtcaaaaatcatagtctgaagcagattatagtcagcaataactccctctacaacaggaaatatgacgttgattgtctcaggcgccttttcatacatggcatatgcacggtctccatatgcatatatctgatttttgtctattacggctattgtgtttttctcaagcattgtcttgcctgtagcctttgagtataccttgaaattgtttgttcccagatcaattccgtaaacgttgttgctcataataattctacctcgtcttctgtttatataagtttattttcatagaagctataatattcgttatctccgattatgatatggtcacaaagctctatggaaaaaatctctgagccctcaattaatctgtctgtgacagcaatatcatttctgctgggagtacaatctccgcttggatgattgtgcaataaaacaagttttgatgcatttttgtccagggcggtcctgatgatggagcctacgtccactacagatgagcttagtgaacccttggatatgaacttgtctcctaagaatctgctttttacatcaaaataggcacaaatgacgacttcatttgtgagatgcctcatctgctccatatagtagtcagctattgtctgaggattattcattctgatgctttgaaccttttttgtctttgctatgcgaagcgacagctctgctatcgctttaagctgtatagcttttatctgccctatcccggggatactaagaagctcctcataggacatctcatagagattgagcagattgccatgcctgccggaaagtatgtcctgtgcaatatcaatcacagtcttgtcccttgtgccggtctttataatgatggcaagtaaatcagcgtctgacaggcctgatgctccaagcgataaaaatttctcatatggtcgctctgaagccggcagatttttaattgttttgttattatgcattaatccctttcgcttctcccaggcgattgacaacggatttaagcaaagttttcagttaattgtagcacacctaatcaagcttaacaagatttctctcataaagtttttgtaaagacatcaaaattccaagctttgcatggtaccatgtgagtcctccctggaaataaaccgcatatggcggcttcacagggccatcggcagaaagttcaatggatgagccctgcacaaatgcgcctgctgccatgatgacatcactgtcatagcccggcatagcccatggctcaggggtcacatagctgtctacaggtgctgctgcctgaatgccctcgcagaaggctatcatggcatcgcggttattgaactctacagcctgtatgatatcgtggcggctttcagtaccgtcagggactaccttaaaaccaagcttttcatagatttttgcggcaaagattgctccctttaatgctccgcttacgacagtcggtgcaaggaaaaagccctgataaaatgactggatgactccgagtgaagctccaacctccttgccaagtcccggagatgtgagacggtatgcggcattttcaacacattcctttttgccgacaatatagcctccgattggtgccagtccgcctcccggatttttgatcagcgagccaaccatcatgtccgctccaacctggataggctctgtatcctcaacaaactcaccgtagcagttatcgaccatacagatcacatcaggctttatgctctttacaaaggcaatgagctcgcctattcttttgaccgaaagtgtaggtcttgtagcatagcccttagagcgctggattgtgacaagcttcgttttttcattgatggctttctttattccgtcatagtcaaactcaccgtcaggcagtaggtcaacctgcgcatatgttatgccgtactcagcaagtgagccctttgaagggcgtatgcctattacctcttcaagtgtatcgtaaggctttccgacagggcttaaaagctcatcacccgggcgcaggtttgacatgagtgcaagtgcaagtgcatgtgtgccacaggtgatctgaggccttacaagtgcatcttctgcgccaaaacagtctgcgtacactctctcaagtgtatcccttccgaggtcattgtagccgtagccgcttgatgcctggaagcactctgcgctcaccttgtttttctgcatggcggctatgaccttaagctgattatactcagcatttgtgtctattttgtcaaaacgctccttaagctccttttctacagaggttccgaaatccaaaacctcctttgatattccaagtgtctcatactgcctgtaaatggcttcattggtatctaacaaattataatcctcttttctgctaaaatttcttgtattttatttaatattttattattatcatatgaatattcatttttttctatccatatggtatctttttctctcctaaaccaggttagctgtctctttgcaaaacgccttgactcaagctttaccttgtccacagcctcatcaagtgaatattctccatcgagatatgcaaggatttccttatatcctatgcccttcatggataccatatcgcttgtacagcccattgcctttagctttttcacctcatcgacaagtccgtttgaaaccatgatatcaactctcttatctatccgctcataaagcctttgtcttacatcatccagtacaaaataggcaaagctgtatggagactgcttggctctttcagtctcattgtgctttgaaatcggctcatggcaggtgtgatagtattcaatggccctgatgacgcgctttacgttattctcatggatgctctcgtaggatgcagggtcgatatccttaagcttttcatgcagtgcatggtttccgtgctcgttagcaaagtcgtacaggctctttctgtatgcctcatccacatcctgctttgtgaaatcaatgtcatacaaaagtgcctgtatataaaagccggtgccgccgacaactatcggtatctttcctgcttcgtatatttcattaagtgctttttttgccatatccttgaagataaatacattgaactcgtcagatggctcaagctcatctatcagatagtgctttatgccgtccatctcatcgactgtaaccttcgcagagcctatatccatgtatttgtatacctgcatggaatccgcggatattatagcaccatttattttttttgcaagctcaatcgatagagctgtctttcctactgctgtcggtcctgtcaggacaatcatcggtttttgtgtcatattgcacctcagtccaaatgtgtatgttgtcatacgatacgtttgaatttcttttctatctcatatttgctcatagagatgatggttggtctgccgtgtgggcagttgtaaggattgtcgagtgacaaaagctcatctatcagcttatttatctcaggaagagtaagcttgtcattgcccttgactgctgccttgcacgacatggatgcgaccttttccgtgatgatatcaggagtctgcctgcctgtcgcattggaaaaatcatcgagcatctctataaacagatccttcatatctatgttaaacaaattatctggaattgcactgatcatgtattccttgccgccaaaatgctccacctcatagccaaactgttctatctgcggcctgtatttctcaagcatctcacattccctggcatcaagtgtcatgacaatcggagggcttatgcgctgtgatgtgaaatccttattggccagtcttgccatcgttttttcatacagcaccttctcatgggctgcatgctggtctatgatataaagcttgtcctcaaactctattaaccagtatgtcttaaagagctgtcctataatggaaaactgtttcttggcgctttctgtaagaaaaaccttgtcgtaatccccaagagtctgctgggtgccggtgacaacctgtgcaggtttatacgcggtggaagtctcaggctttggttccactgaattgccggtatgtccaacaggcgtcgatgcagatgttttagttttctgttggtttaaagtattttctgtgagaggctcattaacagcaggtccttttacagtggagctttttacagtagctgtcacgctctgtccgtacacgctccttgattccgctgccctcacctcattgatacgcctcttctcaaacggctccggtattggctccttatactcatgcactatctttttaggcgccggcgtactgtctacaggcacctcgggaatcatctccttacgagatagaattgcatatattgtgtcacacaattcgacatatatttcattgttgttgtcgaaccgaagctccatcttggtcggatgcacgttgacatccagctcactgaaaaatgtaaagtaaagcactgtaaacggatactgatgctgcattagaaagctcttgtaggcctcctctattgcacgtgacaatatattgctctttacatacctgccgtttatgaaataattctcataatttctgttgccccttgtgataacaggctttcctataaagccctccaccttaaagtattcgcattcatgcttcacctcaagcagtgatgacgatatctcgcgtccgaatatatggtatatgatatcctttctgttgccgtttccggaggtgtgaagctttgtctggttattgtttatgaacttaaacgatatatcaggatgtgaaagcgcaagcttttcaaccatatcgcttatgtagctgccctctgtctgtgctgtctttaaaaacttacgtcttgccggaacattataaaacaaatcctttactatgaaggtagtaccgtccggagcaccgatttcctcgtttgaaagttcctttgagccctcaatcacatatctggtgccggtgagctcatcgtaggtttttgtgataagctcaacgcgggccacggctgaaatgcttgacagcgcctcgcctctgaagccgagtgactttactgtaagtaaatcctctgccgagcggattttgctcgtgctgtgacggtaaaatgcaaccgcaacctggtctctttcaattccgcagccattgtcggtgatacggataaatgagattccaccctcctttatctcgacagtgatggctgtggagcctgcatctatggcattttccaccagttctttaaccacggagcacggacgctcaacaacctctcctgcagctattttatctattgtttcctgatttaatatggcaatatttggcattttaatcctttctaccagcggtttttaaccttgttctggagctgataaagcttgtttaacgcatcaagtggtgtcatgttgcctatgtctatgcttcgaagctcgtcaattatatcatcatccttcactgtgtcgaaaagcgaaatctgtgtcatatcaacctcgtcaagatgctcctttttatgcttgtggccattgtcaacggatatactttttacagtatctgtgatatcatttgcaagaagctgttctgcgatttccttggcacgctctatgactgaatcaggcagccctgcaagctttgctacctgtatgccgtagcttctgtcagctccgccctttacgatttttcttaggaatactatatcatcgcccttttcctttacagcgatgcagtagttgtttacactgtcaagcttgccctcaagctcggtgagctcgtggtaatgcgttgcaaaaagtgtctttgctccgaggagctttggattgcttatgtgctctacaactgcccaggcgatgcttagtccgtcaaatgtactcgtgcctcgtccaatctcatcgagaatgagcagggattttgaggttgcagttcttagtatatttgccacctcgttcatctcaaccataaatgtactttgtccgcttgcaaggtcgtcagatgcaccgactcgcgtgaagatacggtctacaataccgatatttgcagtttgtgcaggtacaaagcttccaatctgtgccatgagaacgataagtgctgtctgtctcatgtaggtggatttaccggccatgtttggccctgtgatgattgagattctgtttttgtgctgatccagatatgtatcgttttctataaacatgtcatttgtaatcattttttcaactacaggatgacgtccgttttttatgtctattatcccactttcatttatctttggcttgcagtaattattctggctggcaacaagcgcaagcgaagcaaaaacatcaatctgtgctatagctctggctgttttctgaatccttgaaacattgtcggaaatctgttttcttacatcacgaaacagctcatactcaagtgatgtgagcctgtcttcagctccaagaatggtatcctcaagctccttaagctccggtgttatgtagcgctcggcattggtgagtgtctgttttctcacataataatcaggaactaaatccttgaaggagtttgtgacctcaaggtaatatccaaataccttgttatatttgattcttaagtttttgatgccggttttttcacgctcaccggcttcaagctcagcaagccatgtctttcccttggtttttgcgtctcgaagacggtcaacctcctcattgtagcctgcttttatgatgtctccatcgcgctgtgagatagggggctcatcctcaatggatgaaagtaaaagctcatatatatccttaagctcgtcgaactcttcattaatctcatcggtaagcgcacacggtatatctgaaagctgctgctttattggtggaagcatttttaaggaatccctgaaggcaataaggtcgcgcggattggctgactggtaggtgattcttgtgatgagacgctcaaggtcataaataggattaaggtattccctgatctcgtctcttgttatttcgtttgcattaagtgcttcgataagcttctggcgctttattatctctgccttttcgataagaggctgctcgacataggtgcgaagcagtcttgctcccatagccgtacgtgtcttatcgagtacccaaagcagtgagcctctcttttgcttttcacgaagggtgtctacaagctccaaattacgtcttgatgagctgtctattatcatatatttgcctattgagtacggatgaagctcaagtatattgtcgagcgagttcatctgcgtttcataaaggtactttaacagggcgccggcagctatgactccactctcataatcctcaagtcccagagcatttattgtctgtacatggaaatgtgaaagcagtgtctcatttgcaagaccatcagaaaaataccatgagtcgagtgctgaaacagtaattgataatctgtttttcatatcgtcaacatctattccactcatgtagaaggcttcgttgcatatgatttccgatggattaaatctgctcacctcatctaacagctttctttccgcatccacctctgtcgtaaaaaaatcacctgttgtgacatcacaggtcgctatgccgtatttgtcctcagtgtatacaatcgacattatgtaattgttttttgcctcatctaaagaagccatatcagtgttagtgccaggtgtcacaacacggattacctctcgctttacgattccctttgcctgctttggatcctccatctgctcacagatagctaccttgtgaccgtttgatacgagtctgttgatatatgagtctgccgcatgaaacggtactccacacataggagctctttcttcaagtccgcagtttttgccggtgagcgtaagctcaagctcctttgaaaccattatcgcatcgtcaaaaaacatctcatagaagtctcctaagcgataaaataaaatacaatccttatattgttcttttgtctgcagataatgctgcatcattggtgatacttctgccacgaatatttcctctctttacgtgtataaatattattcatgtgtataaatattatttaaaatccggcctatattttttaataattgcttctgcgacttttatgccgtcgattgccgcagatgtaatgcctcctgcatagcctgcgccttcaccgcaagggtatacacccgagatattgctctcaaaggattcatctctttttatgcgaagcggagaagatgtgcgtgtctccataccggacaaaatagcatcttttctgtcaaagccatgtatcagatggccaaaatgttccattccaagcttgaacgactgctccatgtcagcgttcatcagtccattcagctttgcaaagacggtgtttccctttgtacaagagccaaaatcaccgtatgctgttgttaatctgtcatcgcagaaatctccgaaaagctgctgtggtattaaaccattgcctcgcttataattttctgtttcaagcttttcttgaaatctcactccggcgagggcatcatctgctccgaaatccttcggcgaaacagatactatgatggcactgttcgcatttttgctgtttctgtcgtgatagctcattccgttaaccaccgtgtgattttcggttgacgatgagttgaccacatatcctcccggacacatgcagaatgaatagactcctctgccattcggaaaattggatgtgaccttgtatgggcttggcggaagtataattttcttttgaataccatactgtgattcatctatcatgcgctgcggatgctccacgcgaaagccgactgcaaagctcttgcactccatatcaaagcctttgttgtaaagcatatcaaatgtatctctggcgctgtgtccgagtgccagaacgcatacatctgtctttatctcactattactgttactgtcagaattcgtgtaaacacttaacagcttttgggaaactatgtcaagattgtttacacaggtgtcaaatataaacgttgttcctttgtcaactaaaagctcacgcatgttgacaattacttctgaaagcacatcagtaccaatatgtggcttgttgtcataaagtatggacggatctgccccaaagcgcacaaatgtctcaagcacaagacgatttctgcccgaaggatcctttacggatgtattcagcttgccgtctgaaaaggttccggcaccgccctcaccaaactgtacattgcttttgggattaagtatgccgctctcccagaatttttgtacatcgcaggttcttttctcaacccggctgccacgctcgataactatcgggcgaaaacctgcctctgccaatatatatgcacaaaacaggccggcagggcctgcccctgcaataacagggcgcctgtcaagcggtatatggccgcatgcaggtatcatgtactctttttctttatatatgagcacagatgagctggctgctctttttacaattgattcttcgctattttttgtatcctctatctctacagcaactgaatatgtatagaacagctcaggctttttacgcgcgtcaagtgatttctttagtatccggtatgtaaagcctgtcttggcattgagcttaagcatttttattattttcttttttaatgcctcatcactgtgcgtgacggggagctttatctggttaattttaatcatttactgcatttctcctgctatatatccacttgtccatgcccactgcagattgtagccaccgcatatgccgtccacatcaagcagctcgccgcaaaagtaaagccccggatggattttggactccaatgtacgtacatctatttcctttgtatatatgccgcctgcacacacctgtgcaaattcggatcctcttggcttttttaccgaaacggctgtatgctttattgagcgggtgagacttttacaatcatcatctgtcaacagccttccctttttgtcaggagatacacctgatttgtgtatcagctcaagaagaagcttattgtttaaaagtccgttaagcatctcatttagcgagcggttgtctgtcgttgtaatgcttctgtcctttatgtacccattaagcttatcatcactaaaagccggcaaaaagtcaattatcacctcgaccctttgacctttatcgatggctcttgacataagacttgaaatctgaaaaaccgggatgcctgagatgccatagtcagctaactgaagctcccctgtattttgctctgtcatttgaccgtctatcacggaagcgacagtggcatcgcacctgacacctgtgatttttttgaaattaagaccatcacagctaaagccgcaaagcgcgggtaacggcttttggatatggtgtccgagagcttctagctgtcgaaacaggcttccgtcacttccaagctttggggaagccgtaaggccacacgctatgataagccttttggacttaaagctgcccttgtctgtttggatgcagtaaccggtccggtcatctgtcttcttattagttgccggattagcagcagactttgtgtctttagccataatccctgtagtcttaatttctgtaatacttatgcctgttttcacatccacatgaagtctcataagctccatgcgaaaggctgccacaacagatgcagcctgtcttgaatttggataaatgtagcctgcattgtcatatgcaggtattccaagttctttaaaaaaacgtattgtgtctgcataattaaattgcgacaacccgtttttaatcagcgctttactgccgtgaaacttatttacagacatatcagtgtttgtgaaattacatctgccgtttcctgttgcaagtattttctttcctatatcatccttgtgctctaaaagtgccacgcgtgctccctttgatgcagcagttgctgccgccatcagcccggatgcaccggcacctattataattacatcgtacatattctttcccctaactgatttattttaacattaactcgaatagctttcaagaaaatcgtacaaatcagtttcgttaaaaaagtagagtccgtttgtaaccttattttttgcttcatctggcagctcttcaaaatacacgcctgtgtcaaagtatttttcacttgcagtggcgttgtatacagacagcattccggagtcatttttgatgcggtattttgcattcttagcctcatttgatgtcagaaggctttctttttcatttttttcttctttatcattttcattgctttgtgcaattatcgcagccttgtctgcagctctttgcgtattgattttttctatcataacaagtgcaagaagaattacaacaatagttaaaaaacagatactgattttgcttttcatattatcacctcaaaatcagtatctgtaaatttttgttatttattcaattttatgattaaagggtcaaaaggtatcatcatatcattttataataaatgacatttttttaccacttttatgataagtgtgccctttggaaaatgtctaagctcatcctcagtcagtcccttgagcaaaagcagcgcaactgcatatgagataaccgcaatgattgcagcaagaatgaaggcgataatctcaatatgacaggccttgtaaagtataaagtatactatatacgaaataactcccattatgagcgagctgatggccggtatgataaaggtcttttttatttcctgcttaaagccgctgtacttctttaaagccatgctgttcataaaacacatgagcaatgcaaaaaacgtattggcaagcacaactgcatgtatattgagcctgaatatgagcataagcagtatgagcactatgacatgcgctacaatggatatcgcagcgttgattaccggaactttgagcctgtcaatgccctgcagcagtccgttggacagagtggaaagcgagtaaaatactaccgcaaccgcaccgacatacatcataagtgatgcctcagcatttgttacacgggtgcttgagaacagtatattaaatattggcagtccaaacacggcaagccctactgcacatgggaaagcgacaaccatgataaagcgtgtggaaagattaatctgtcctctcactgcctccatgtcgtccctgtgatatgcgcctgtaagcaccggcacaaaggatgctgccatagctgatgctatggatataggcacattgattaaaagcttgtactttccggtgtatacaccccaccatacgtctatatcattctgagtgtatccctgaagcagtgcaacctgcttgaatataccctggtcgataataccactgatattgtatatagtagtacttaaaagcacaggaataaccgtaattacaagaatcttcattgtgtagccaaatgagttcaccctgacatttcgttctcttttcatctttctcttgaacaccttcatatagatggcaaagataaatactacaaataaaagagccgctacagagccaagcactgttccaagtgtaccaccggctgcaccgtaggcagcggcatagtgctccttgtcaccaagtactgcgccaatccttgtacctgtacggtatagcacatatgcagcccatacactgactatggcatttactatctgctctattatctgtgagacggcactcggcatcatagtacccagtccctggaaaaagcctctgatgacgccaagtactgcaactaccaaaagccccggagccagtactcttaaggcaaaaatactgtatggtgtgttaagaagcgttgttgcaaaaaaattgccaccaaaaaacagtatgagtgcaaccgttgtgccgctgatggttgcaaatagcagagcacacttcagtatctgatacgtcgcagtccgcctcttttttgccatctgggctgaaaccatctttgatacggcaagtggtaagctgtatgatgatataatcagcatgacattatatatttcaaaagctgtggaataatagccgattccgatatcgcccaatatacgctgcatcggtatgcgatatatgagtcctattattctgcttatgatagatgctacggcaagtatggagccctgtactaaggcattacttgccccattgttttttttagacatttataaaatcctctgtttcaattgataaccagcttaaatattagcgtgttatacctaaagcgtcaagtatttttctctggtgctcttccattacggccgcctcatcagcctccatgtggtcatatccgaacagatgaagcatgctgtgtgtaatcagaaaggcaaactctcttttttcgctgtgtccgtattctatggcctgctcctttactttgtcgacggatatgataatgtcacctagcatgacctctcctgtatcaggattgaaatcatcctcattttcatctgaaaggaaagaaaaatctccgggcgtttcatatgaaagcatcggaaaagatagtacatctgtaggcctgtctatctgtctgtactccttattgatggcatgtatcccttcattgtctgtcagcgtcaaattaacctccgcctcatacggaaagctctcgtgctcaagtgaagcagaaacaacagcttctgcgaccttttcataatcaaaattaaaattgcattctacttctttttcgataaaaaaactcatttattgctcttcctctgctttcttgcagtctttgcagtctgcttattttcataatcatcatatgcctgaacgattttttgtacaagcggatgacgcacgacatccttgcttgtcagattgcatatgcctatatcatctatgtttttaagcaccctaagtgccacatcaagccctgattttgctcccggtgcaagatccttttgtgtcgcatcacctgtcacgacaacctttgagccaaagccgattcttgtaagaaacatcttcatctgtgcaggagttgtattctgtgcctcatcaagtatgataaatgcattgtcaagtgtacggcctctcatgtacgcaagaggagccacctcaataaggcccttttccatgttgcgctggaagctctcagctcccattatctgataaagagcatcgtacaatggtctcaaatatgggtcaatcttgctctgcagatctcccggcagaaagccaagcttctcgcctgcttcaatcgcaggacgtgtcaggataatacggcccacctgctcatttttaaaagctgttatagccattgccatggcaagataggtctttcctgttccggcaggacccatgccaaacacaatcatctttttcctgattgcgtcgacatattccttctggcctatggtttttggctttacaggctttccatttattgtgtgacaaatgatatccttgtcaatctcaacaatctcactgcctttatgctcctctaaaagtgcaagtgcgtagtttacgttctgctctgtaatgacgttgcctctctcagccagcgcaatgagctgctcgaacacctcttttgccccatcaatatttccctgcgctccgataatctttaaggaatcatctcttaagacaagcgttacatgcagtgtgcgctctattttcttggcgaatgcatcaaactgtccaaagacgtttggtatatattcgcccggtatttttatagatacttcatttaaactcattagctcatgtgcctttcaatcaaaatattttccattataacataaaaataaaatttgtcataatttacctataatttattccctctgatatatcaattttcatggtatttttttctatgtatatactgcaccacgtgatatcgggatatttttcctcaagctttttttcaaggagactgtaatctgctctcttgtggctgcctattgttacattttcactctccataaaggagatgaccgactcatcatacgtgaaacggtttccttcaggcacaatgtgccagattcttgtgcagatgagtgcatgtatacaaaaaacgccgataattgcagctgtaataatacgtattttatatagaaatgctcttatcgcaaagtatccctgtctttttaccacgagaagccttgtatgtgtctttttcaggtgcggcttcattagaaaaatatcttctgtactacagcaggcctcatattcctttggacttacatatttaaggttccatatttttatatggtttgccgtgcacagatttatgaagcgcctgatattgcagcctgttagccttactgttgcataagctttaatactcatatataacaccctttaaatgaccggctattattattaaatcctttgtaaattcctttatttcaaggcggctgccggatatttttatggtactgtctgctgcccttacagttacggccttgtccgaaaatgacagaatacccttgtggttttctatagtcaattcattataaccatatgctgttacaattggaagccctagcactatgtcctttggaagctcgaacgaatcagttactttttgcatcttcatatattaacatatgtttatttaggctgaattatgccggttatttgtggtacggctcattattgctgatgcgaaatgacctgtaaatctgctccagtaaaattacgcgcatgagctgatgaggaaatgtcattttagaaaatgaaagcttatagtcagcgcactttaatatatcattggacaacccaagagagcctcctattacaaaaacaagatgacttttgccgccagtcataagcttatccatcttctgtgacagctcaaccgaatcaagctgttttccatctatcgccagacaaaatacatatgcatcatcctttatatttttaagaagcctctcaccttctttattttttacgatgtctatctctgtctgtgtggcctgctcgcttgtcttttcatcggaaacctcaatgatttcaagcttacagtaacggcttaggcgctttgaatactcagcaattgcatctctgtaaaatttttctttaacttttcctacacataatattgtaattttcatcgtttcattataacatataactataattaaacaatatggaggccgtatgaaaatatacgttgatgaacaaaaacgatacgaggatacaaaagcaaccggacagtgcttcaccgcagtcggtgcgatagggcttattgctattgtgctgcttgatacaggagttataaagcttgccgctttagactcggtaaacaagcttatggtttctatcgtaatggggcttgttttcttgatattttttatcataggaatgaagtcatttatggagctaaaagacatttcaaaaaaaattgatctgaataattccctcgaaaaggaaatcatggaatacgtgaccgtcactcataaggacgagcttatgactttagcgtcatcgggtgaaaaaggagatgcctgctcgggtgatttatactacaaaagagctgagcttatcacatcagtcattactgaaaaatacagcctgcttgaggaaagcttcctcgatcatatggttgaagaaatttattctaaaatttatagtgatattgtcgaagaatagtgctataataataacaatttattttttatgaggtgaacaaaatgaaagaactgcaagatcgaattctcaaggatggccaggttattggcacaaatatcttaaaggttaacaaatttatcaaccatcaggtggatccggtgcttatggagcacatcggtgaggatttcgcaaatcactttgccggtaagggaatcacaaaggttgtcacaatagagagctcaggaattgctccggcacttatggcagcagccaagatgaatgtaccgcttgttattttaaagaagcagccttcaaagacattacatactgatttatatcagacacaggttacttcatttacaacagagaagagttatgagcttacactctcacgcgatgtaatctcagaggatgacaatattcttttgattgatgatttcatggctgacggagaggctgctacaggtgccatcagacttcttcgtatggctcacgctacagttgccggtataggaatccttattgagaagtcattccagcctggcagaagaaagatcaacgagcagggctatgaggtttactcacttgcacgtatcaagtacatggatgagtatcagatagattttattgaagaaaattaaaataagatttaatatttaaaatcaatacatattatacacaaaatccactaccctatttacagatttatgagtctgtcaatgagtagtggatttttattattgttatagtatatgttttatgctaaactgccggattatgctccgaaatcgaaaagtgaaagctggtttgattccggcagtgaaccaagcagtcccaaatctgacatgaggtctacggctgttcgcgatacatgagttctctccctgaaatcgtcctttgagaggaatggtccgtcctttgccgcttccgaaatataaatagcggcattgtcgcctagtccgtcaatactgtttatggccggcatgagcttaccgtcaattatctggaaacggttagggtgagccctgtatatatcaagaggcatgaaatcaaagcctctggcatacatctcctgtacgatacgcatgtccttaaatacatcctgctccttgtttgacagcgtgtcttttcttttcttatagtccttcatgtagttttcgagtcggtcctttccctgacacataagctcatatgaaaagcctgtggcacggattgaaaagtatgctgcgtagtatgcaagcggatagaaaaccttacagtaggcgattctccatgccatcataacgtatgccgcagcatgggctttagggaacatgtacttgattttctcgcatgaccagatataccagtcaggcacaccgtgtgccttcatatcctccttccattgtggccactgaggacatttgcccttggcaataatgccctttcgcactttctccatgatgttgaaggcttcctcagattcaagtcccatggaaatcagatatgtcataatatcatctctggtacagatacaggttgaaatggtagctgtgccttcctcgataagagtctgtgcattgccaagccatacgtccgtaccgtgtgataatccggcgatacgaatgaggtcagaaaactcctttggctttgtatcaaggagcatgcccatggcaaaatcggtaccaaactccggtatacctaaagctccaagcggacatccatcgatatcctcaggctctatgcccaaagcggaggtgttctgaaacagtgacatgacagccttgtcgtcaagcggaatctttgttgggtcaacacctgtcagatcctgcagcatacgaatcatggtaggatcatcgtgtccaagtatatcgagctttaacaggttgtggtcgattgaatggtagtcaaaatgcgttgtcgtgatgtcaacggtcatatcattcgcaggatgctgtacaggagtaaaggtattaatctcctcacccatcggcagcacaactataccacccggatgctgtcccgtagtacgtcgaacaccgacacagccctgcactatcctgtctatctcgcaatttcgctttctgataccgcgctcctcataatagtttttaatgtatccaaatgcggtcttgtcagcaagtgtacctatggttccggctttaaaggtctggccctctccgaaaataacctcggtatatttgtgtgcctttgactggtactcaccggagaagttcagatcgatatccggctccttgtttcccttgaaaccgaggaaggtttcaaacggaatatcaaagccctccttgcttaaaggtctgccgcactttggacagagcttatccggcatatcacagccaccacggcctgaaaatgcctgtacctctggtgaatcaaaatcactgtatttgcagtgtgtacacaaatagtgagcatgtagcggattaacctctgtgatacctgacatggttgcaacaaacgagcttcctacggagcctcgcgagccaaccagatagccatcctcatttgatttccacacaagcttctgtgcgatgatgtacattacggcatagccgtttgaaataatggagttaagctctctgtcaagacgctccttaactataggcggaagcggatctccgtacatcctgtttgccttgttatagcagatttcacgaagcatgccgtcagagttttcgataaccggcggacatttatcaggtctgaccggtgagatacgctcacacatgtctgctatcttattggtattggtgatgactacctcctcagcctttttgcttccaagatattcaaactcctttagcatttcctctgtggtccttaaataaagcggagcctgctcatctgcatccttaaagcccttaccggccatgataatacgacggtatacctcgtcctcgggatttaagaaatgtacgtcacaggttgcaacaaccagctttccaaattcctctccaagctttacgattcgcttatttatatcgataaggtcatcgtttgaagcaatatcggaatcctcgtcacgtatcataaatgcgttgttgccaagaggctgtatctccaggtaatcatagaaattcacaagccttgtgatttcctcctgtggtcttccgtttaaaatagccctgtaaagctctcctgcctcacaggctgagcctattaaaagcccatcacgatacttgttaaactctgattttggtattctcggtctcttattataatacttgatgtgtgacagcgagataagcctgtagagattggtacgcccctggtcacaggttgcaagaatgatggcatggtatgtaggcatcttccttatcatctcaacagatgattttgccagggcatttacctcatctaagcctgatatgcccctgtcctttagcttttctatgaatttgacaaatatctctgcggtacatgcggcatcatccactgctctgtgatgatggtcaagcgagatgtttagagccttggccactgtatccagcttaaatctgtttagctgtggcagaagcactctcgcaagagccaccgtgtccactatagtaggattacactccatgccaagcagcgcgcagtttcgctttataaagctcatatcaaagtcagcgttgtgggcgaccatgatgcagtccttgcaaaactccataaactgtggcagtatgacatccactgttggcgatgtgataaccatgtcatcccttattgaggtgagctcctcaatcctgaacggaataggtacctcagggtttataaatgtggaatagcggtctacaatctcgccaccgatgaccttcaccgcacctatttctataattttattcttttccggagaaaagcctgttgtctctatatcaaataccacgtacttgtcatccagcgactgaccggctgcgttctccacaatatcctttgtatcatcgaccagatatgcttccacaccgtaaatgaccttgaatttatcatccacagtatggttagcatcagggaatgcctgcacatcaccgtggtctgtaatagcaatggccttgtgcccccagcgcatggcacacttcacaatatcctttacgtcagacacgccatccatgtcactcatcttggtgtgacagtgaagctcaacacgtttttcggcagcagtatcctccctctttgatgtaaaatcaggtatctttttaagtccgactattgagcttattgacaaatcactgtcatatttatctacagtcacaactccctttgccttaacaaagttgcccggggcaatatatgcaagaatatctgctacgtcatcatttctggcaaagagcttgagcatgatggtgtctgtgaaatcagtgacagcaaacataatgatagtcttttcgtttctgatttcgcgggattcaaccgtaagaatcttgccctttattgtaacctcaccgataggaccgtcaatcttttcaatggacatctcttcatcatcaaagcttcttccatacacgatatcagggtcattgtcatatttacgtctgaaatctcccttgcgctcgaacttcttctcaaatttcttttcaaatttcttctcaggctttttatcagtgccggccgaattactccttgaattgctgtcagagtctgtttttgcctcttttttcctgtttgaaactttagttgcctcagttttactatcatttattgtactgaatgcattctcactgcctcctacaaacattgcaccatcatcgacagccactttagcatcttcatcaccgtcatcttttgccatggcaaatttagtgcgggcgacaatattttgcacctcctgctcaatctgcttgtcagcattctgacggtatttgctgatttttggtttttcgtactgcagattaacgataaaatccatcccacagcgctcgcagaacaccttctcaagaaattctatgaccgaattgcctctggtctttgcgattattgtctcctcaagtgtgactgtgacatgtgtatcgtcggtaaagctccactttgaggtgcgcagcagattgtacaaaagcacactgtgactgtttatttcgtcaagaatactgtcaaaatagacatcaaaaagagtcttcggtgtgtactgcgaagacaactcgtaagactctataatttttactgtaatatctttacttttaaatatctgttttttaatgctttcctcaagcttccagatattttttttgaaaataaggcgttttgcttttacatatattttgtaaaaatctcttgcatggtttacggaaattctggtgacatcagcattctccagcagattctccatatccttgtccagcttaagtgtagggaaaacttccttaaatgtctttgtcaaaattattcaccccaatggtcaagctcatatttcaatgcacccaaaagctcgctctcaggcacctttttaaatacctcaccgtgctttatgataagaccctcgccgattcctccggccacgccaagatctgcttcctttgcttcacccggtccgtttaccacacagcccatgacagcaacctttatgtcaaggtcatatcctgaaaccattgtctccacctgatttgcaagcccgataagatctatctgtgtgcggccgcaggtaggacatgaaacaacctctatgccaccctttctaagaccaagagttcttaaaatgagcttggcagactttatttcctcgagagggcttcctgtgagagacacacgtattgtatcacctatgccctggtttagtatcagtccgagtccgatagcagactttatattgccgcttattattgtgcctgcctctgtgatacccacatggagcggatgattggttttatctgaaataagctcatgtgctttaacacacatcatgacatctgatgatttgatgcttatgacaagattgtcataccccatatcctctatgagctttaccttgtccaaagcgctctccacaagtccctctgctgtcacaccatgatatttctctaccaggtctttttcaagagagccactgtttacaccgacgcggataggaatatttctctcctttgctacatccacgacagcctttaccctttcagcgcttcctatgttgccgggattgattctgattttgtcggctccgttttcaatcgcagctattgcaagcttgtaatcaaagtgtatatccgcaacaagcggtatgctgatttgtttcttaatctccttaagtgcccttgcagcctccatcgtaggcacagcacatcggattatatcacagcctaagtctgtcagcgcgtttatctgcgcaactgtgtcagctacattctcagtctttgtatttgtcattgactgtatgagaatcgggtttcctccaccgattactttatttccgatttttactatttttgtctccatgtgtatatctccaatctgttataaaatcagactattagatttctgatatcattgaacatgacaacaaccatcagaagaagtaaaagcactatgccaacgagatgcacatagccctccttctcagggtctactctctttcttcttatggcttcaactatcaaaaatacaagtctgccaccatcaagtgccggcagtggcagcaggttcatcacaccgaggtttgcagaaatcagcacgccccagtttagcatatttaatatgccaagccatactccggacatagaaactgcctgctcataggtgtctcccatgttttttacaatgccgacaggtccgcttaagttatttacagaggcagccccggtacagagcattttaagcccctctattgtcgtatagatgttgtatttcacctcgtagcagctataaagcagcgcctttccaaagcctggctttgtacgctctcccgacacgttaaagccgtacagatacctctttgttgtctcgtcatatttaggcttcaatgtggtggtgtgctttttgccatccctaaggtatgtcacatcaactgtttcaccttcgtgaagcatcgagtagaggcttatctcgcggtaaaagtgtatattcgtattgttcagctttacaatctcatcaccggccttgataccggcctcctcagccgcataaccctcaataacacctgcaagcttcggactgtcatagcctacagagcagatgataatgagagcaaaaataaatgccatgataaaattaaaaaacggccctgcgaaaacaacgcttatgcgcgcccacactgatttgttgttgaacgccctgtcatcacctgagctttcatcctcaccctccatgatacaggctccgccaaacggaagcagctttatggagtatttggtctctccacgctgcactccaaaaagagtcggtccaagtccaagacaaaattcattgacctttatgccatttgctttagcaagccagaaatgtccgagctcgtgaaaaattactatgatgctgaataatatgattgcaataataatactaataatgttcaaaattaccaccttttactgatatagtcatatgcgcactgctctgtatcaagtatctcatccactgaaggattttcaataaatgatgcattctccatacatgcctcgattatatcgattatttccagatatttaatttttttattcaaaaacagtgccaccgctctctcgtttgcagcattgaaggccgtaggaatattgcctcctgcccttgcagccttcatggcgagagcaagccctttaaaggtatcaagatccggtgcctcaaaggtcagatccttaagcttaaagagatcaagcctgtcaccggaaagcgcaggtctgcttggataatacagtgcatactgtataggtatacgcatatcaggagtaccaagctgtgctataactgctccatccgcatactcaacagccgagtgaatgacactctgaggatgcactacaacctgaatctgcgacaaatcgacatcaaaaagccattttgcttcaatcacctcaagccccttattgaccatggttgatgaatcaatagtgattttttgacccattgaccagttaggatgctttagtgcgtcctccacccttataccttcaagctcagagagctttctgcctctgaacggacctccggatgctgtcagaagaatctttttaatcggattcatagaatttccctgcagtgactggaagatggcactgtgctcactgtccaccggaagaatggacacaccatactctttcgcaagcgggataatgatatggcccgctgtaacgagggtctccttatttgcgagtgcgatggtcttttttgccttgatggcggcaattgtaggacgaatgccaagcataccgacaattgcagttacaactatatcgcaaggctcaatggtggcacatctaatgagaccgtccatgccataacctacttcgatatcagtatccgcaaggcttgtgcgaagctttttggcatcgttttcatcacttacactgacaaactgtggcttaaattcccttgcctgtttctctataagggagagatttctgccacaggaaagtgccacaacctgcatatcaccatgctctcttatcacatcaagtgtttgtgttccgatagagccggttgaaccaagtattgatatttttttcatgataattcctcgatttatatttttctcagtggttctgaatagttaccttagctttttgttttcaatggttcttaaatgttactttttaacttaaaaagaagctagccagataataaatgattggtgctgtgataatcatgctgtcaaagcggtctaaaataccaccatgtccgggtatcagatgtccgtaatccttgatatcataattacgctttatggctgatgcgcacaaatctccaaccattgaaataaggcctgcaacagcagctataacagcaagtatagcaatctctgtgccgtctatattcatatgatttctgaatataaagcagtataatgctgtaagaagcgcactgccgagtacaccacctactgcaccctctatagacttctttggtgaaagctttggtgccattttgtgctttccaatcagcactccgacgcagtaggcacatgtatcacagccccaagagcataaaaataccaagaaggcaaggtaaagtccgttgttgagtgtacgtatctggtagacatatgaaagcattgttcctacataaaacataccaaaaaaggctgccatgagctgctttgcatcatatttcgggtatgacagcacatacacgaacatcagtacaataagaaagcccatgaaaagcatcattacatcaggtatgaagctccaccttaagttgatgtaaaataaaatcaaagcaatatacggtacaaccgataagagcgatttttcaaatttaaacaccctgaaaagctcaaacatacctatacacgaaatcagaagtgttgaaaaaagaagcacctcgtttcctgttactataagaaatatagcggcaattacaagaactataccactaagcagtcttgtcttaaacattatttatcctccgtgtcgttcgtttcttttaatccaccaaagcgacggtctcttttattatatgcatctatagcctttttgagttcatttttatcaaatgcaggccacggaacatctgtaaaataaaactcagcgtatgcaagctgccagagcaggtagtttgacaggcgctgctcaccacttgtgcggatgagtaaatcaggatccggaagctctcttgtgtcaagatatgatgagaaggtatctgcatctatatcatcagctgaaagctttccatcatcatggtcagctatcatatgctttacagcacgtatcatctcatctctacttccgtaattaattgcaattgtcaggttaagacctgtatttactgatgaaacttcttcaaggtttcttattttctcctgaaaattctctgaaagcctgcttatctcaccaattacgcgcacacgcatattgtttttattggcagtctttatgcagtttttaagatagctttcaagaagcttcattagtgcagcgacttcagactcagggcggttccagttttcagtggaaaaggcgtaaagtgtcagatatttaacgccgaggtcgtttgcagccttacatatattctcaacatttttggctcctactgtatgaccgtagtttcttggcatacccttacttttggcccagcggccgtttccgtccagaatgattgctatatgttccggagtactcatattttatttcctttcatttatgcatattatatatttacaatcatgacgcatcatttatttgctggtcacacagttaagtgtgaacagtaaaaccgggaataagcaaataagggacacgaataacatgtcccttgtttgtatacgtgatataaatactatacagtaagtatctctttacattttgcgtcaaccgcagcgtcaacctttgcgacaaacttgtcggtaagcttttgagcgtcatcctcgaggcctttaatctcatcctctgaaatgccttcctctttgccggtcttcttgatgctgtcgattgcatcccttctgatattgcggacagcaactttagcttcctcgccttttttcttgatgtcctttgcaagatctttacgtctctcctctgtaagctcagggaaaacaagtctgataagctttccgtcgtttgtaggattaattccgatgtcagagcagtttattgctttctcaatctccttaaccatagaagcctcccatggctgaatctgaatcattctaggctctggaacacttacattggctacactctgaattggtgaaggtgtgccgtaataatctacacgaagcttgtcaagaatatgtggattggctcttcctgcacggatgcctgcatactcttcctcgagattatttaatgttttttccattttatcctggaaagggtttaatcttgaatccatattatcctcctgatatgcattatatgcaatttactatacagtaacctttgtaccgttaaatttgcctgtaagagcatttacaatgctgttttcctcattgagtccgaatacatacataggcatcttgttctcaaggcacatgatagacgctgtgagatcaactactgcgagcttcttctcaacaacctcttcgattgaaagctcatcatacttctttgcagcaggattggtctttggatcactgtcatatactccgtcaatagccttggcaaggtaaataccatctgcctcaatctcaattgcacgaagcactgtggctgtatctgttgagaaataaggatggcctgtaccacctgcaaagaaaactaccatatcatgtgcaaaatacttgtttgctctgtccttagagaaaagctttgtcatgttgccacattcaaacggagtgagaaccgctgtcttcattccaacatatctgaaaatctcagatacataaatgcagttcataactgtagcaagcataccaatctggtcagcctttgtgcggtcgatggtctcacttgttctgcctctccagaagtttccgccaccgataacaatacctacctgtgtacctttatcaacaatttgtttaacctgttttgcaacctcaatgactgtagcctcatcaaagccgtggtgcttatcacctgcaagtgcctcaccacttaattttaataatattctactcatatttatttctcctctaaaagtccatgaacatcgatatcgtcctgtacataccctgataaaacgttattgtttgctgtctggctaattcattatcctttgagtccatatgcgtcccccgttatgattggttttgtttcctcttactattttaccatatttttatatcttgtaaagatataaaaattccgcaaaagtttaaaagttaaacttttgcggaacagcattcgtttaatcagtataaagatacagtttagactccagccatctgggcagcaacctcagcagcgaaatcttcctgcttcttctccataccctcacctacctcgaaacgaaccatctcggtgattgtaagatccttagaaactgactcaagatattttgcaactgactgctttccatcctctgccttaacatatgtctggtcaaggagacaaatctcttttaactgcttagatacacgaccctcaactaaaccattgaacatcttctcagccatgatagactccttgtctgccattgcaagctcaccaagctttgccttagcagcatctgataagaagttccatacatagttcatgttgttcttgtgctcgttgaagttgttgatatcatcatcgctccaaagcttctcgttaatagccttgtcaattaacttattaagaataggctttggaagtgttgtagcatcatttaatgcactgtcaacagtgatctctctaagctttgcaagctcttcatcagagatatcgtttctgctgatgtactgtgggttcatagctgcaacctgcatagcaatatttgtgattgcttctttagctgcatcatctgctgcaccatttgctgcaatgataacgccgattcttccaccaccatggatataagaagtaacaacatcacctgtaacctttgcaaatctacgaacagataacttctctccgattgtagctgtcttctctacaagaagctcgctaagtccgtttgtggcaagaagagcgtcgatatcctctccatttgcaccaccatttaagccagaagcaagtgctgtatctgctacagtctgaacaaactcctggaatgtctcgttctttgcaacgaaatctgtctcagagttaacctctgctacaactgcaacgtttccgtttacagcaacacgtgcgattccctcagcggcaattctgctctgcttcttttccatcttagctgcaccgctttttcttaatacctcaacagcggcatccatatcaccgtttgtctcagttaaagcctttttgcagtccatcatacctgcgcctgtcatttcacgcagttcttttaccatacctgctgtaatagccatttgattatcctccgatattaatgtgttttattcctcaactatctcgtcagaagcttcctcagcagtaacctcttcctcagctccctgctttgcctcgataacagcgtctgccatcttagatacgattaatttgacagctctgatagcatcatcgtttcctgggataacataatctaactcgtcaggatcgcagtttgtatcagcaatacctataagagtgattccaagtgcctgagcctctttgatacagatacgctccttcttaggatctactacaaatattgcatcaggaattctcttcatatccttgattccaccaaggttcttctcgagcttctcccactccttcttgagtgcgataacttccttcttaggaagaacatcgaatgtgccatcctctgacattgtctcgatagctttaagtcttgcaatacggctctcgattgtgcggaagtttgtaagcattccacctaaccatctctcgtttacatagtacataccgcaacgctctgcctcagtcttgattgcatcctgagcctgcttctttgtacctacgaaaaggattgtaccaccctgagcagcgatatcagatacggcatcatatgcctcatcaacctttcctacagacttctgtaagtcgatgatgtagataccattacgctctgtgtagatgtaaggagccattttagggttccatcttcttgtctgatgtccaaaatgaacacctgcctcgagtaactgtttcattgaaattacgctcattttatttacctccgtttggttattaatcttccgtgtgtttccaattagatcagccaccggtaagcgttatccggcaccggcgatcatccgcacacgtgctttatagtatttaagcctttggaattataacataccaaaggcttatatgcaagtaaaaaaatttatttctgtgtcagaatagtgattatatcatcatactattgtattattttgtcgacagacgtactatatattatatatgccgaaaacataaaattaaatttagttacttgtttttatttcggattctgtcaagctcatcaaagactacatcgtttactactttgatgtatgtgcccttcataccggatgagcgcgattcgataacgcctgcactctcaaacttgcgcagtgcattcacaattaccgagcgggtaatgcctactctgtcggctattctgctggcaacaagtataccctcattgccgtcaagctcatcaaagatgtggagaatagcctcaagttccgaataagaaagtgtattgatagctgaacggacaatcgatacctttctcttttcctcttcattctcctcattcacggatctcatcatctcaagccccaccactgtcgtgccatactctgtaagaatgatatcgtcaatgtcatactctctgtcacttctgtactcaaaaagagttccaagcctctcaccggctatatcaataggtgtaataatagccttgtacatccttgtatcttcaccaaagccaagcgtctcaaggtttacattctcctttgttgaaaggatgccaagaagtctttcattgagctcagtgtcaatatagcctccaacctcatctactatcagttcatgaagctcatccacgcctttgcagatactagagccaagcaccttgccctttttgctgattacaagtatgtctgagtcgagcaccccggtgagcacctgacatatatcattgaacacaacctttgatgaattgttgttgtgaagaagcttattaatcttacgtgtcttatctaataattgtactcccattaattgttattcctctctttcgggctttttatctgttacgtagccgcactgctcatctgcgcaggcaatcttgtttccctttacaatcatatatcctccacaacgagggcatttttctgcaacaggtctgccccagctcataaaatcacactctgggttgtcaatacagccatagtattttcttcccttccttgttttcttgagtacaacatccttaccgcatttagggcaattgacgccgattttttcaagataaggcatagtgaatctgcagtcaggaaatcccggacatgccaaaaacttgccgtgaggtccgtattttataaccagattgcgtccgcactcagggcagatttcatctgtcacctcatcatgtattgtaaccttctcaagctcattttcagccttgtcgattgcctctttaagatcaggataaaagttctcaacaactgtcttccagttaacctttccctcggctaccgcatctaaaagcgactccatattggctgtaaaatgctcatcgacaatagttggaaatgattccttcataatagaatttacaacctctcctatctctgtcacatagagatttttactctccttggtaatatagcgtctggcaagtattgtagatattgttggagaataggtactaggacgtcctattccaagctcttcaagtgtctttaccaaagaagcctctgtgtagtgtgccgggggctgggtaaaatgctgcttaggcaaaagctcctcaactgtaagaagtgattcttctgtcagaggatttttaagaacaggctgcttttctttctttgcatcgtctgcagcagtatatgcaagctcaaaaccatcaaataacagtcttgacgtagcaaagctgaatacataatctccgactgagagctttactgtagtagtctcgtactcagattttgccattcggcttgcagtaaaacgcttccagataagctgataaagcctgaactggtctctcgacagtgactccttaatctcagaaggcactctgtttatatcagttggcctgattgcctcatgggcatcctgtatatttttgctgctcttctttgttccctcaccggtggaaagatatttgtctccatagctttttgaaataaaatcctttgccatggcctcggcctcatctgatacacggacagaatcagtacgcaggtatgtgattatacctaccgtaccctgtccctttatgtcaactccttcatagagctgctgggctatacgcatagtctttgatattgggaaattcagagcctttgaagcctcctgctgtaaagtactggttgtaaaaggaagcggagctttattgctgcgctggccttttttgatgctttgtactttacactccttaccctttatttcgctaagcacattatccatctcttcctttgaggaaatggctatcttgtcgtcacccctgccgtatagctttgcagtaattggcttcttctcaccctccacatcaaccgtggcatcaaggctccagtactcctcaggaataaaagcattgatttcatcctccctgtcacagatgatacgaagcgcaacagactgtactcttcccgcactaagtcctctcttgaccttggcccaaagcagcggactgattttgtaacctacaatacggtccaaaactcgtctggcctgctgtgcatctacaagatccatatctatttttcttgggtgctttaaggattccttgacagcattcttcgtgatctcattaaagctgatacggcttacatccttgccctcaagtttaagtgcgtgaagcagatgccatgagatggcttctccctcacggtcgggatcggttgcgagatatatcttatcggctttcttagcctccttgcgaagcttagcgagtatttcaccctttccacggattgtgatatatttcggttcaaaatctccgtccacatctattccaaggctgctctttggcagatctctcacgtgaccgtttgatgccattacctcatagttttttcccaagaatttctttatagtctttacttttgcaggcgactctacgataaccagatatttagccattataaactccttatatagtaatttggaattgtctccttaacaaatcctttttgtataagattttctaacacttcaaatagttccgataattcatacggcactttttgagacaatgtcccgattgcgataggacaaaaatcgagtaaactatacaccaatgcttcttttttatcaagtaaattttttctgaaatccatctgtgtgcactctgtaaacccagtcattgtaatgtctgagacaaattcatcaatattataaataatgcctgcgccctgctttatcagactgttgcagccgtagcttaaggtgtcggtgatacgccccggaatgacatatacgtcctttccctgctccattgcaaaatcagccgtaatcagtgaaccacttctcttttttgcctcaactataactactatatcggataacccggaaattattctgtttctcatcggaaaaaacatcttttgcgggtcggtgcccggcataagctcgctgattatgcctccaaagacctttattttatcatatagaaagcggttctctttcggataacaggtgtctgctccggagccaagaactgcatatgtatttccaccagcctcaagacaccccatatgggcatctctgtctattcctcttgccatgccgctgattatctgtattccctgccttgaaagtgctgctgccagtacctttgccacctcgcagccatatgcgcttctgccccgtgctccgactatagcgacactttttcttgatttgtcgggaagagcgcctatgtaaaaaagactatacggcggattatgtatatttctaagcttgtccggataagcctcatcctccattgttacaaagtcgatatccttctgctgaaataatatccactccttctctacgtcataggaagctcttgattcaaggattatttttctgtcatcatctgtgaaaaacaaaatatcaaaaagctcatcctttggcataaaaaacagcttttctgccgttatactgcaatcatgcagaagctttttcttcgcattgcttatatctgtaaggcttgtaagccagtatttgaacttcatgatacagcacctccccagaacttctcattgatgcttctgtagcatatagcttcgttgagatgctttgtctttatgttttcacaaccgtccagatcagctattgtacgcgcaaccttaagtatcttatggtatgtgcgtgctgtcagtccaagcttgtcaaacatattttccatgtagcttttctcacgactgccgaggaaacagtatttttccagcttgtcagttgatatttttgaattatacgaaaagctctcacctttaaacctttctttttgaagctcgtgacagtgcataacacgctttcttatgtccgcagatgattcattggatgtagtactgtttatatcctcaaagctaagaggtgacgcctccacacatatgtcaattctgtctattataggctgagagaccttatcaaaatatctgcgcagagtcggctctgagcagcggcacctttgcatatcgggataatagccgcagctgcatgggttcatcgcaccaaaaagcagaaaattagccggataagtcacgtttctgccggctcttgaaagcctgatgcagtgctcctcaagcggagccctgagcagatccagcaggccgcccttaaactcagcgagctcatccagaaacaaaacgccattgtgtgcaagcgatatctcgcccggattaattctcgttcctccgccgattaatgcggcctgggtgacggaatagtggggatttctgaatggtctgctgtcccttaaggagctgtcattgtccaaaagaccacagatgctgtatatttttgacagctcaagtctctcgttttcactaagaggaggcagaattgacggcatacgctctgctatcattgttttgcctgcaccgggaggtccgacaagcagtatattgtgcataccaccagcagccacctcacatgctcttttaataaatttctgtccgttaacatcacaaaaatcggcgtatttttcatccatttgcagctcatgtgccatgccggttttctgacacgtaaatgctgcctcatcaaactgtgcaattacatcatttaaatggcttatcccaaatatttttgcaccacagacgagtctgccttcattttcattctgctttggaataataaactttccaatgcctttgttgtactcatcaaatacaatcggcagaataccgctgaccggcaaaatttcaccgtttagatttagctcacctgcaagtgtgcagtcctttatgctatcagcgtcaatcactcccatagctgttaaaacagcaacagctataggcagatcaaagcctgttccggtctttttaatatttgcaggcgatagatttactgtgatacgcttggcaggcaaaacaatgccaacgctgtgcagcgctgttttaacacgctcctttgcttctcttacctctgaggtgagatttccaaccatatcaaaaacaggcatgccggttgaaatatcaacctccacctgtaccggaatcgcactgattccatccaaaacagccgttctgactgtactgtacatatatactcctattccaattggggtaaatgcatagacaaatgcacaaaagacatggctctatgataacatatttttgccttttgtaaacacctattcgagcagttttcgtaattttttcaaaccggccttttcaattcttgaaacatatgacctcgaaatgctgagcgttttagcaatctgcctctgtgtcagctctttttcaccgtctaggccaaagcgtttcgtaataatataatattctctgtccgataaaacgcttctcatatttttccttaaaatcttaagtgattcagacacctctatatccgataccacatcagattgtccattctcaatcacatccaccagatgaatctggtttccctccttgtcagtgcctataggttcaaatatggacacatcaccccggctctttttacggcttctaaagtgcatcagaatctcattttcgatgcatctgatcgcaaaggttgcaaaacgatttccgtaatcagccttgaatgatgacactgcttttatcagtcctatagtgcctatggatatgagctcctccatctcatcctcgcttactgcatatttttttgtaacatgtgccacaaggcgcatattgtgtaatataagctcatccttagcttctttgtcattttgagccacttttttcagacattccgtctcacgttctaaactaagaggtgataaaaatgtattcacatagcaccctgtcattatttgcttataatatattatgttcaaatctgtattttgtgatataatctttgccatgaatagaaaaatagactacaaaatcaatgaaaatgatacaggaaaaacagtagaaggctttttgaaagagcatggctacacacatcaggtgcttgtcaggctgaagcagacagaccatggcatactaagaaacggtatatgggcctatacaaatgaaaggctgtgtaaggatgatttaatcacagtccaaattgtagaaaacgaatgctctgataatatagaacctgtaaatctgcctcttgatatagcatacgaggacgatgatatcatcgtaataaacaagccgtttgatatgcctgcccatccctccgccggaaaccatgacaacacgcttgcaaatgcgctcatgtactactatggcagtcagaacaagccgtttgtatacagatgcataaacaggctggacagagataccacagggcttacaattgtcgcaaagcatgcacttgcaggcgggatacttggcaacgctgtcgcaaagcgtgccatacaccggacatactacgccgtctgcagtgggtgtacacctatatgcatgcgcatcagtgctccgattgcaagaaaggatgcttccaccatagagcggtgtgttgatttcaaacgcggtgaatatgcagtaaccgactttatcagaatcaaatataaccctgataataatttatcgcttgtcaagctaagacttcttaccggacgcactcaccagatacgcgttcatatgaagtatatcggttttccactgataggtgactttttatataatcccgactatacatatatatccagacaagcactgcactcagggcgtcttgttttcacgcaccctgtcacaggacaaaaaatgaacctcatatctgatattccatcagacatgaagtccctgttctagttggtttattttatccttttcgtatgggatatgcccttttaaaacctctttttttatgtagctgtaagtgtattcttctccctttacagagagcatgacaagcagatactcaagcattgcttttgtatcgggatgaatcatgtagtgatccacgcttttttcatagtattccagtgcacttttgtcggtgtacttttctttctgatagttttttgaggcgcttacacggtctataaacatctcgcagacataccttatgggcattttcatgccctccatttttgtatgtgctttatcgtcccccggctttgaaacagcatagtcaatccagtactccaggtgatgcttattgcgtcccttatgatgaagccacgcagatgaatagcccctgtcggctctctccgcattattcgggctcatatcccccttgtaatacctgcagccgacgagaaactcagtcggtgaatattttgacatatcatgaagaagtccctgtttataaagccctatcctaaagcacccctgcatgaccaaaatcttgtgatgtgtaattgttataaaatgtcttattgctttcatatgtctatctgcctatgaggatgtataccgactgcggtgagacatctgcatactgctggttttcacacagcaccggagtgtcataaaacggttctttgagcgtagaatcgcagactttataccatttcattcctttctttagcttaggaagagctaacttctccctggatgaataaaaattgtaagctacgtatacatagtctttattcacttcattgtaatcaccacagtacatcacacctacacatagctttgtggcatcacactcgcctatccaagcattcttgcagtggtaggacaaatcaggatacccaacagccttgtaatcgctgaatttaaacggctttggacaggaaataacaggatgctcatccctgaatttgataagtctggttaagaacctgatgttttcccttctgctctgctcatttgaccagttcacccagcctgtagggttgtcctgacagtaagcattgttgttgccatcctgtgaattacagatctcatcacctgccataatcataggcactccctgtgccaaaaacaaaagaagcatggcatccttccacttaagttttcttatctcacggataaacctctttcgcgaaggcccctcacaaccgtaattattgctgaaattccatgaaggaccatcagcatttttctcaccattggcctcattgtggcggtcattgtacatgaataaatcgctcagggtaaagccgttattgcttgatatatagtttataaatccgacattctccccctgctttttctgctggtttaaaagctcatacatattgcagttgatatggtttaacatcatacgcgccgcaaactggtactcctccttgtcaatatagagattttcgtatgtcctgttttgcggtacgactgacatgtcaaagccatcatagagtatctttgtcctgctaagaagggcatcctgtactatcgcagtaaccgggagcttatccccaagaagcttaaaaccatctacatgaaagctcatgacccagtatctgagcgcatcgagtatcagattgtggtcagttctatcaggaaaatacatctctacgatacattccatgccatttttgtgcagcctttcaacgagacgcctaagctcattggaggcatctgaagcgtcactggcatatgatgcttttacggcaaaataattgccgtaggtatagccccagaaattgaccttgtcattttgcctgtcggtgttcacactttgctcatcctttaaggaatacttcggctttgcatattccggaatatcgtgctttacagggattgtcatttcttcaaactcgtatacaggcatgagaagaattgaagtaaagcctaatttcttgatgtaatttattctgtccgatacagcctcaaaggtgcccttatgctttttgtcccctgaaacatccatggaaaagcctctcacatgaagcttatacagcttcatccggtccctggttatctcaggaaagctgtcatatttccagtcaaaatcactactgtctatcccgcaggctatttcgtaatcattgtcacttcttgttttatcattccatttttctctgccgaaaattcttgtggcatagggatctatgcacctttttccattaattctaaaataatatgcatattcattcctgcaaaaaccatgaagtctcacagagtaaagtgaacctgtcgaatactcggcaggtatatcaatcacacaggcggtatttcccgatttatcaagtaaaacaatgctgcattcatcctctttttctgctgcaaaggtgaatattgcactatccccctcaatataagcacctgtttttaaaaagtttccctttgttaatcgaaaattcatgcaacaccatccaatcaataattctagtatttatttattatactagttttgactttttttgtatagaataatttgatataatataatagttactttagattactataaagaaagaggtacaatatggcagaaaaagcaacacctgttacacctgatgaggcagacgatatccgcgtaacacttgatctggacaacggaagtgtcgaatgcaagattatcacaatttttgatgcagatcacaaggattacatagctcttctaccgttagacaaaaatggcaacgagaatgagagtggcgaagtgtatctgtatcgctatttcgaggacgaggaaggtcttccgagaatagaaaatatcgaatccgacgacgagtacgaggctgctgccgacagattcgatgagcttttggatgacgaaatgtttgatgatatttaatcatctctactattattttgtctaggctctttactttcacggacaaacctggaggcttgggctgatttatcgtttaccgacttgaccgagtaaacagacaagcttgtcttggcacgggtcatgccgacataaaacagccttcgctcctcctctatgtccttttcaagcacagcctttttatacggcattatcccttcatttgcatcaattatatacacgttttcaaattcaagcccctttgagctgtgaagggttgcaagtgtcacggcattagggtcactttctttcgataaagccataagcttcatctgctttgtatattcctttatatgctcataccactcttcataagtagcaaaacccttggctcctgactggatttcatccagtatatcaaacaaatcctctttatttatattcctatactcggcatattcagctaaaaagtcgtcataaccaatccctcttctgatatagtttatgctggcatatggattcatccggcttataagcttcatgtcatactcaagcttttctatccgctcagctatccacggcttctcatcaaacagcttaatccactcatcaaatgccacagttgcatcacacaggctgtctcttgacagataccgctttggtctgttcataatctgcaaaaaatcagctctgtctctgctgcctcctgcaattctttggtatgtaaacaagtctctggcaatccagtgctcatatatattaggtatattatccttggttttgaatgggatattatagctcataagctgctctataagctgtcttggctgggtatttgtcctgaaaagcaccgcaaagtcgctgaatacagctcctgcctttatctttttatctatatcgcgtatgagaaagatattttcgtctcttctgttttcaaaatcagcaaacgtaacaggcgcctttgacttgcttgccgcaatgattttcttatcaaatctctccctgttgtgcgagatgagattcaacgaggcctccactatatatctgccacatctgtaattagtatctaaaaggattctttttgcatccggatagtccttctcaaacccaagcattatctcaggctttgaccctctgaagcggtatattgactggtcatcatctcctacaataaacagattattctgtggagcggcaagcatttttataatctcatactgcagacggttaatatcctgaaactcatcaatcagtatgtatttatacttattctgccacaatgccagtatatcaggtctttccttaaacagctcataagtatacgagagcatatcatcaaaatcaataagcctgttttccttaagccttgtctcatattttttatatatatccctgaatatttcctcaccacacactcccgagtagaaattttctatatcaatgcggctgtttttaatcagactgatttcagcaagtaaattgcctataaactcattctcatccttgtattcaaggcggtagtaggataaaatttccctgataaagccgtatctcacagactcatcagcaatattggcacttgtaaagcgatatgcatatttgagtatcgtaaaaaagacagcatgaaaagtaccaaaagatacgttcaccctctcgtctgcaaattacgctcaaacggaatgccagttccgctactgcggaacggctattccatttttaacggtacgaagtaccgcttatcaatgttctttgttttgctctcttgcgacagcttgtttattttatcaaatcactgttcgtttgtcaagcactttttttatttttttgaactctgttttaagttctctgtcttgcgacagcttgtttattctatcaaaatgttttgcatttgtcaagaacttttttaaattattttatgtagaagataaagcggagaaggagggatttgaaccctcgcgccagtttcccgacctatacccttagcaggggcacctcttcggccacttgagtacttctccaaagtctttacataaattatttaaatgttttacgcacttacgtgacgcattgtttattctataaaattttctttgttttgtcaatagtatttttatatttttttaaattcttttattgaagtctcgtacagattgtttccttcactgtctattaccacaattaccgggaaatcttctacgtatatctttcttattgcctctgcaccgagatcatcatagcagattacttctgatgattttatgcattttgaaaggagagcgcctgctccaccgactgcggcaaaatacactgctttattgcgaatgactgcatctattacttcttttgatctttttcctttgccaatcattgctttttcacctaaatcaagcagtcttggggcatacttgtccattcttgttgctgttgtaggtccggctgagccaattggacgaccatctctggccggtgatggtcccatatagtagattgtcgaatcctttatatctattggcagttcttctttacggtccagcgcctctatcattcttttatgtgcagcatctcttgccacatacatttcacctgttatgtatacatagtctcctgatttcaggtcttttgttattttctgtgtgattggagttgttatatgtttttccatttttttctcctgattcttttatttttactgtatttttatttttccagcataatataacctgtaactattatagctttttaattacggttcacatttcactgtagctgtaacaattaaaattgccattttctttcttctacgcagtaattctttacaattccttcactacatggcgatttacgtgacagcaaatatttaccgcaaccggcaatcctgcaatgtgggttggatatgtgtttatgtttactgcgagggcagtagtgcttccgccgagtcctccaggccctatacccagattattaattttttcaagcatctctttttcaagctctgccacatactctatgtctgaatgtatgcctgcttctcttgtcagcgctttttttgccattattgcgcatttttcaaaggttccaccgactccgactccgacaaccataggaggacatgcgtttggccctgcatctgaaactgctgtcagaatcgcattttttactccctctataccatctgccggctttaacataaatacacggctcatgttttcgcttccaaagccctttggtgcaaaggttattttgactttgtcgccggaaactattgagtaatggatgactgcaggtgtgttgtcctttgtattttccctgatgagcggatcctttaccactgattttctcagatagccgtcggtgtaaccctgtctgactccttcatttatggcatcctccaatacgcctcctgtaaaatggacatcctggcctatttctatgaaaaaaactgccattccggtatcctgacatatcggtatcatatcctcgcctgctatttttaagttttcctgtagctggtttaatatttttttacctaaaggtgattcttcatttgctgttgcagctttaagtgccttgtccatgtccggcgaaagaaaatgatttgcctgtatgcacatttcctttactgcagctgttatttctgaaacgtttatttccctgatcatttcttttcctctctttttattctctgtattttaaattccggctccttttatccacaattcaagattattttttgtgtttttgtggataaacatatttatttttccgtattatgtttatttattactttcaaagtctctgaaaacgcaaatatgatgcatagtgcttgcatgtaaacattttttcgcaataaggctcgaatagtatcaccacattcgcaaaaagcaggatcttatgaccctgcttttatgaatttagttatgcttctgtgttattttcgatagcttcagcatgtgaattattattctctgctgagtcttcgtcactattttctgattcgtcattctcttccttagcttcctcaggtggcatgagagtcttatcctctactacctttgcgatgctggctacgctcactccttctttcaggttgatgagcttgacacctgttgtgattcgtccaagcactgttacatcacttacctggattctgatgataatgccctctgttgtaatgagcatgagctcatcatcgttttcaactgatttgactcctacgagattgcctgatttttctgtaatcttgtagcattttactcccttaccgccacggttttgtgtggtaaattcgtcaattcgtgtacgctttccaagtccgtttgatgatactaaaagcactgcctcacccattgatgcggtctgcattgcgattattacatcatttggtgcaagattcattccgataacacccatggttgtacggcctgttgagcgcacatctgtctccttgaatctgatacactgtccgaatttggtgaagagcaaaatatcctctgaattgtctgtgaccttgacctctatgagtttgtcgtcctctcgcagattgattgctgcaagtccgttctttcggatattctcataatcctttatcggtgttttcttgactattccgtttcttgtagccatgaacagatacttgtcatcctcgtattctttgattggaatcatggctgttattttctcgtcaggctgaagaggtatgagattgatgatggctgtgcctcttgatgtacggcttgcctcaggtatctcatatgccttgattctgtatactcttcctgtatttgtgaaaaacatcaggtagtggtgtgatgtggtcatgagcatctcgacgatataatcatcctcgattgtctccattccctttattcccttgccaccgcggtgctgagccttgaaattgtcagtgctcatgcgctttatgtagcctacctttgtcattgttatgactgtatttgtctcaggaatgagatcctccatcgacatatcatactcgtcatagcctatttctgtttttctgtcgtcgccgtatttatctgcaattgcgatgatttcctccctgattactccaagaagctttttctcatcggcaagaattgcctttaactgcgcaatctgagccatgagctccttatactcagcctcgagcttttctctttccaaacctgtcagagccctaagacgcatatcaacaattgcctgtgactgctcatcagtcaggccaaatctctccatcaatctggtctttgcctgctgtgtagtctggcttgagcggataatacttattacctcgtctatgttgtcctgggcaataatgagaccctctacaatatgtgccctggcctctgccttgtcgagatcaaactttgtacgtctggtcactacatccttctggtggatgagatagtagttgagcagatcgtatagatttaatacctttggctctccgtttacgagtgcaaggtttatcactccaaacgtatcttggagctgtgtatgcttgaaaagcagatttaaaactacactcgggttcacatctcggcgaagctctaccacgattctcattccctcacggcttgtctcgtcgcggaggtctgttattccatctatctttttgtccttatgaagctcggctattttctcaataagacgagctttgtttacgttgtatggcagctctgtcactacaattctgtttttgccgttttccatcggctcgatattggtgacagcacggactcttattttgccgcggcctgttctgtaagcctctttgatgccacttgttccgagaattatgccgcctgtagggaaatccggtccctttaccacatcgataagctcatcaattgtggtttctttgtcctcgatatcgttgtcgataaggcgcactacggcattgaccacttcacgcagattgtgaggtgggatattggttgccatacctaccgcgattcccgtggttccgtttactaaaaggttcggatatcttgatgggagcactgtcggctctttttctgtctcatcaaagtttggctcaaaatctactgtatttttgccgatatccttgattaattcaagagaaatctttgagagtctcgcctctgtgtatcgcatggcggcggctccgtctccatcgactgaaccaaagtttccatgaccgtccacgagtgtgtatctcatagaccagtcctgtgccatatttacgagtgctccatagattgagctgtctccgtgtggatggtatttacccattgtatcaccgacaatacgcgcacattttctatgtggcttgtcaggtgtatttccgagctcgaccatagagtagagtactcgcctctgaacaggctttaatccgtccctgacatcagggagggcacggcttgcaataacgctcatcgcgtaatctatgtaggagctctccattgtttttttcaaatcgacctgctgtatctggtcaaaaattttgtcgtccacttaaattactcctccctgctagatgtcaagatttgttacatacttggcattagcttcaataaattcttttcttggctctaccttatcacccatcagtgtggtaaatgtcacatcaagctcagatgaattttctccgtctatcatgacctgtttcaaaattctgtgatcaggatccattgttgtctcccagagctgatcagcatccatctcgccaagtcccttgtatcgctggatcttgttattattgtcacggcctatgtcatttaaaatctgcttgagctcgtcatcatcgtaggcataccatacacccttgtttttctccaccttgtaaagtggcggggtagccaggtatacatgtccctccttgatcagatccggcatgaatctgtagaggaaggtgagcatgagagtagcgatgtgagcaccgtctacatcggcatctgtcatgatgattatcttgtcataacgcagctttgttatatcaaaatcctcatggattcctgttccgaatgctgtaatcatggctctgatttctgcattgtcatatatacggtcaagtcttgccttttcaacattcagtatcttgcctcgcagaggtaaaattgcctgtgtagcacggctccttgctgtctttgcagaaccgccggctgaatctccctcgactatgaaaatttcacagtttttaggatccttgtctgagcagtcagcaagcttgcccggcagagtacctccatcgagagatgtctttcttctggtcaggtctcttgcttttcttgcggcctctctggctctttgtgctaaaagtgatttctcacagatatttttggctacatcaggattctgctcgaggaaatatgtgagtttttccgatacaactgcatctacagctcctctggcctcactgtttccaagcttctgctttgtctgtccctcgaactgaggctcctcaatcttgatactgatgattgcggtaagtccctcacggatatcatcacctgtcagagccggatctgaatccttaagtatctttttctcacgcgcataggcattgaaggtctttgtcaaggcatttctaaagcctgcgagatgagtacctccctcaggtgtgattacattgtttacaaagctgaaggttgaatcattaaacgaatcattgtgctgcaatgcaacctctacataaacaccattttgtgttccctcgcagtagatgacctcatcatagagagcctccttgccacggttaagatactctacaaattccttgattccgccctcatagtggaatacatgattgtgatggctattctcacgcacatcctttaaagtaatcttaagtccttttgtgaggaaggctgtctctctgagacgctgctttaaggtatcgtagtcatacactgtctcctcaaaaatctccggatccggcagaaaatgcacctttgtaccatgaagcgactcgtcacactgtccaacaatctttactgtatcgtctgttttgccacgcttgtagctttgtctgtaaatatttccgtccttgtagacctcaactgtcagccatgtggaaagagcatttactacagatgcaccaactccgtgcagaccgcctgataccttatagcctccaccgccgaatttaccacctgcgtgaagcactgtaaaaacgacctcaagtgctgatttttttgctttatgattggttccgaccgggattcctcgtccatcatcctgtactgttatggaattgtcttcctcgattgtgacctcgatatttttgcaataaccggctaaggcctcatcaactgcattgtccactatctcgtaaaccagatgatgaagtcctctcgaagacgtactgccgatatacatacccggtctttttctgaccgcctcaagaccctcaagtatctgaatctggtcagctccgtattcctgattgttctgctgtatttctttactcatcaataacctccacctggcccttcacgacatgaaagaccttgtccacctgaaatctattttttacaaattcatcaagtcccgtacaagtgataatggtctgtgtatcacttaagctgttgagcagatagttctgcctgttgccatccagctctgaaagcacatcatccagtaaaagtacgggagtgctgtttatatttttctttacaagactaatctcagaaagcttgagtgagagagcagatgtcctctgctgaccctgcgatccgtattttctgatatccacaccgtccactgaaaaaagcatatcgtccctgtgcggtccgacagttgtctggcatagcttcaaatccctgcttcttgccttaagcagctcgtcctcgaaaaaaatatcatcaatgctcggctcatatttgagtataagcttctccctgcctcccgaaatactgctgtgaatgtcctgtattatctcatttagctcattaacaaactcgcgccgcttttttataacatgcctgccatactcaagaagctgcatatcccatacctgaagtgtatcaatcaaatcaggtctgtaagctatatcctttaacagtctgttcctctgaactaatgtcttattatacttactcaggttagacagataaattttgtcaagctggcaaagctccaaatctataaatctgcgtctctcggcaggaccgtttttgataatattgagatcctcaggagagaaaaacacaatattcaaaataccaaacagctcactcgcttttttgattggcattttattgatggccacaccctttgcaccgttttttcgcagatgcatgtcaatccggtattccttgtcatttttttcgacaattgtcctgatatgtgcctcatcctcgccaaaccggatcatttccttgtccttgctgcccttatgggactttgtagtgccgctcaaatatgcagcctcaagtatatttgtcttgccctgggcattatcgccgtagattatgttggtttcactgtcaaagctgatatccagtttttcgtaatttctgaaattactcagttggattgactttataatcattatttaacaaccttaactgtttcgccgtcatatgagaaaacatctccgtcgtgaagcttttttcctctctgaagctcaatctcaccgtttacagtcacctgaccatcctgaataacaatttttgcctcaactcccgagctcacaaggttggcctttttaagagcctgtcccagcttaatgaactcatcctgttctcttatagaaatctgtttcataaaatctcctagtttgctgctgtattaaaatttaccggaagaatgaggtaaataaacttgccctcatcatccttaatgaagcatggtgcctttggattgaccatgtataaattaacctcctcctcatcgataacacgaagtgcatctatgaagaacttaggattaaagcctatcataatatcttttccgtctttgtcgatatcgatgtcctcattcatggaaccgataaatgaattgatgcgaagctccatattgccatctgtgatattcatgataataggcttcttatctccctccttgacaagaagagtagcacggtctatacagtcaagaagctctcgcttattgatgcgaaccttagtgtcgtagtcagatgaaagcatctggtcaatcttgaaatactcaccctcgataagacgtgaaacaacagtagtattttcaaattcaaaaacaatatgattattggtgatgtatataacaacatcctcatccgctgaacccgggataatcttgcttatttcctgcagagtcttgccgggaacaacaaccttcttgctgtcatagtgatttttcatctcgatatatctgatagatattctgtgtccgtcaagagaaacaactcgaagcttattctcctcaatctcaaaaagctcacctgtcatcagcttattgttgtcattatcagcaattgagaaaattgtctgtctgataacctctttaagggtaaattgtgaaaggacaatagactcatttctctcaacatatggtatgtaagaaaaatcatcacctgattttccgatgatattgaacttggctttttcacatgatatgacggtcttgaaggaagcatctgtctcaattgttacgtcattgtcaggaagctttctcactatttctgaaaaaatcttggcatcaagagcgataattcctctttcttcgatggttccgtctattattgtttcgattccaagctccatatcgttagccataagcttaatctcgtttgcggatgcatcgatcagtatacactcgagaattgccattgtagtacgtgtaggtactgccttcgatacgatattaacacctttcagtaaatttgcttttgaacaaataagtttcatttagaaaaactccttcctgcgcgtatatataaatatttaaaagatattcgtaatattattcttaggggctgttaaaaagttcaaaaccccttcaaagcctttaaagacaagctttaagcggcttgataacttgattaaaagcctgttgaagtaaaaatgataaaaattgataactttttattcactttccttcaacctgtcattaacatgctcatgtggaaataaaagcaaggttataaccaaattattaacatgcaaatgagcacatatataaataggtagaaactaatttggattaatctttttcttgatagtttctatgagagtacgtgtactgtcattctcctcgtaatccttggtgaccttcttgatgccgtggatgatagtagagtggtctctgccgcccaaaagctggccgattacatcaagtgaatcagaggtcatggtcttgcagaggtacatggcaatctgtcttggacgtgcaatctcgctgcttctggtctttgaaatcatctggtctacagagatgtggaaatgttctgaaactacctcgatgattagctgtgcagtgatttcccttggcttgtccggcgtgatgatattggaaagctccctctcagcgatatccatagtgatgtgagtatgctcgagattgtggaaggctaaaagcttgtttaaggctccctcaagctcacggatgttggagctgatgtttgaagcaatgtagtttaagatatcatcatctatatcaaaattgtcagtttcagctttcttacggaggatagccatcctcgtctcatagtcaggagtaccgatatcagccatcagtccccactcgaaacgtgagcggatgcgttcctcgagagtctccatctccttaggcggcttatcagaggtaaggataatctgcttgccctgtgtctgcagtgtgttgaaggtgtggaaaaactcctcctgagtactttcctttcctatgatgaactggatatcatcaatcatgagcacatctacagtcctgtatttgtcacggaactttgtcatggcagaagaattaccgttacggatagattcgataacctcgttggtaaactcttcagaagtaacataaagcaccttggtatcaggattctggtcaatgatgaaatgacctattgaatgcataagatgagtcttgccaagtcccggaccaccatatatatatagcggattgtatgcttcacccgggctttctgccactgcaagagaagcagaatgggcaaacctgttattattacctacgacaaaggtgtcaaatgtatagttagggtttaagtttgagtgatccccctttacaggagtctgtggctcaagctgaggggtatcgttgtttttaaacttaaggctctgagcctgatccggtaaaataaactggatatcatactcgatacctgtcacctcacctacagctaccttaagaggaagataatattttttgttgatatagctgagccccatctgctcagacggaacgagaatatacagtgtattgccgtctatggcgaacacctcaagcggttttatccacgtattaaaggaaacgtctgtcagaccatgctcttccttgaccatctgtagtatttcattccacttttccattactttatccatcaaagttctccattatttaacatataaagagtatattatgggaatgttctccacaatcccatacatactatatagtacactatttttggcatttaggcaatgtaaaaagatttacaaaaatactttattcacattttttaaccacaattatacaaagttaccaacatgttattcacatattgtggataactttttgatatcttgataactttccacaatatgttggtcacaataggtggtttatatcaaaatatagacggttatcaagaattattatatatatagaagaaactcgttttccacatttttattgtggaatgtaaaccggttaaaaaatatatgtagaaatttaaagaaaattgagaaaatccttgacacaacagtaatttttgttataattataccgatgttttttaacgtaaaggaggtggatatatatgaagatgacattccaacctaagaagagacagagagcaaaagttcatggattcagacagagaatgaaaactgctggcggaagaaaagtaatcgcagccagaagattaaaaggaagaaaaaaattatcagcataggccacaatttttgtggtcttttcttcatttttgattgtttttagaaggacagcgtcaaatgaaattttcagattcgttgaaaaaaaacaaggattttcagaatgtatataataacggtgtatcgtttgctaacagatacctcgttatgtatgttctgaaaaataacacagaaaataatcgtataggtatatcagttagcaaaaaagttggaaatagtgttattagacatcatattactcgtctcgtgagagagagctacagactacatgaggacatgttcgatagtggtttggacatcgtagtcatcgcaagagttgcagcgcggcatgtgggttataaggaaatagaaagtgctgttttacatcttggaggtcttcacaggattattaagaaacaaaatatttgaataatgaaaaagaagatggaatcgttttgaaaagtatcttaatatttttgattaaattttataggaagtatatttccccgatgaaatcaacgaaatgcccatattgtccgacctgttcggagtatggtttgcaggctgtgcaaaagtacggtgccataaagggtggtctgcttgcggcatggaggatattgagatgtaatcctttttcaaagggtgggtatgatccggttccatagcagcaatggaggtttttatgtcggacattttattaaccgcatatccaggctctattcttggaccaattgccaagcttctcggtatcctgatggattggatatacagtggtatatctaatattacaggtggaagagttgagagcgttgtactaagtattgtaattattacgattataatctacatgtgtctgttgccactgactattaagcagcagaagttttctaagctatcacagaaaatgcagcccgagatgcaggctatacaggctaaatataaaaataaaaaggatcaggcttcaatgatggccatgcaggaggagacacagcttttataccagaagtacggtatttctccgatgggaagctgtgtgcagatgcttatacagatgcctattctgtttgcactgtaccgtgtgttctacaatattcctgcttatctgagcggagttaagggctcttttacagggcttgttgattcaattcagcagacaagcggatatcagaatacacttgtcagtctgatggaaaagtataatgttgttacatcaagcggtcttaacgcttcaaatgcggcttcaaagcttgccgatgcaagtggtgatactttaagcaattatatcattgatatcctttataagcttccttcaaagggctgggatgctcttatggacggtaagttttttgatggtatccagagcgcagttgagaagacgcacgatgcgttacttcatttcaactactttttgggactgaatatctcagatacaccttggtatatcataaaaagcaactttacggacaagcctgataagtggttactttttgtaatacttgcactgcttattcctgtactgtcatatctgacacagatgcttaatatcaagctcatgccacaggctacaaacggcaatgatcaggtggcaaatcagatgaagatgatgaatctcatgatgccgcttatgtcattgtttatctgcttcacagttcctgtaggtcttggtatttactggatctgctctgcacttgtaagaggtatccagcagttcttcgtcaacagacatatagagaatcttgatcttgaggctgttatggcaaagaacgaggaaaaggcaaagaagaagagagaaaaaatgggactgtctgaggattatataaagaaggcagctcagattaagacaaagtcaattgacaataaggcaaatgtatctgtatcagcaggcacagaggagaagctggcaaaggccgctgagtacaaggctaatgcaaaggcaggctcacttgcttcaaaggctaatatggttaaagagtttaatgaacgcaattcacgcaaatagggggagaaaatagtggaatacattgaagtatctgcaaaaacaattgacgatgctttgacagaggcatctattaaacttggaacaacaagcgataagctcgagtatgaggtaattgataagggaagcaatggttttcttggaattggcagccgtgatgctgtcatcaaggttaaaaaggccgaagtaagtgttgaggatgagattcgcgaattccttgacagtgtgtttaaggcaatgaagcttgaggttactattgatatcaaagtggatgaggacaacagaaatgttgatgttgagcttaacggatctgagatgggcgttttaatcggcaagagaggtcagactctcgattcactccagtaccttacaaatcttgctatcaataagcagtctgagaattactacagagtaaagattgatactgaggattacagaaagagaagaagagagacacttgagaatcttgccaagaatatttcatttaaggttaagcgtacaaagagacctgtttctcttgagccgatgaatccttttgagagaagagtgattcattctgcacttcagaatgatagatttgttgaaacacacagcgagggtgatgagccttacagacacgttgttgtgacacttaagaaataatagatataaatcattaaaagggtatctggtttcaggtatcctttttgaatatatattatcttagaatttttgaggaatttcatatgcaaaatgatacaatagcggctattgccacagctatgtctccgtcaggaatcggaattatcaggataagcggagatgatgcactttcggtaatagacaggatttataaaagtaagaataataaaaagaaaataagcgcctgtcagtcacataccattcattatggttttatatatgacggcgatgagaaaatagatgaggttatggtgcttttgatgaaggctccaaatacatacactagggaggacactgtggagatagactgccacggtggtgtgtatgttatgaagagagtgcttgaagccgtaatcaaaaacggagcaagaccggcagagcccggagagtttactaaaagggcatttttaaacggcaggattgatttatcccaggcagaatctgtcatagatgtaataaattcaaaaaatgattttgcgctcaaaagctctttaagccagctaggcggagccgtgcttggaagcatcaggcagataagagagcagcttttgcatgagattgcatttattgagtcggcacttgacgaccctgaacacatttctctggatggttatccacaaaaactacgtacaattgtggataacgagtatgtggagatagatggtctgttaaaaacctcagataatggaaggattctgaaggaaggaataaacacagtaatcattggaaagccaaatgccggaaagtcatcgcttttaaatgtgcttgtcggaagtgacagggcaattgtcacggatatagcaggaaccacgagagatgtgcttgaggaacagattaatattggtggaatcaccttaaatctcgttgatactgcaggcatcagaagcactgaggatgttgttgaaaaaattggtgtgaaaaaggctatggagcatgccaatggagctgatttaatcatatatgtagttgattcgtcagtggcacttgatgataatgattatgatattatcaattttattaaggataaaaaggcagtcattttactaaataagtcggatctggcctctaatgtgtctgcagatgatataaaaaagcttgtggataaaactgttatctcggtttctgcaaaggaaagcttgggaatagatgagctttctgatacaataaagaatatgttttttgatggagaggtctcattcaatgatgagatttatatcacaaatatcaggcataaaaaactattgtcagatgctaaggaaagtcttaagcttgttatgaacagtattgatgatgatatgccggaggatttttattcgattgatttgatgagtgcgtatgagtcgcttggactcataataggagaatcggttgaggatgatctgatggatgagatattcagtaaattttgtatgggaaagtaggcagttatgtgcagtaagtttgttgaagaaaattatgatgttgttgtagttggtgcaggacatgcaggttgtgaggcagcacttgcgtgtgccaggcttggacttgagactattgttttcacggtaagcgtggacagtatagcgctcatgccatgtaatccgaatatcggtggaagctctaaggggcatctcgtcagggagattgatgcacttggcggcgagatgggaaaaaacattgacaagacctttatccagtcaaagatgctaaataaatcgaaggggcctgctgttcattctctccgcgcgcaggcagataaagcggaatatagtatggaaatgagaaaaacccttcaaaataccgaccatctgaccatcagacagggtgaggtttctgagattgttaccgatgagaataataatatagtcggtgcaaaaactacttcgggagctttatatcattgtaaggcgattgtgctgtgtaccggtacatatttaagagccagatgcttaaccggcgagatgatcactcatacaggtccgaatggacttttggcagccaaccatctgactcagtcgctcatagatcacggaattgagatgcgcagattcaaaacaggaactccagcgcgtgtagataagagaagtcttgatttttccaagatggaggagcagttcggtgacgagagggtagtgccgttttcatttacaactgatcctgaaagtgtgcagattgatcaggtttcatgctggcttacatatacgaatagtaagacacatgagattatcagaaacaatctagaccgttcgccgatttatgcaggtatcatagagggaacaggtccgaggtattgtccttcaatagaggataaggttgttaagtttgcggagaaggaaagacatcagatatttattgaacctgagggtttaaacacaaacgagatgtatgtcggaggtatgtcatcttctatgcctgaggatgtgcagtatgagatgtaccgcacccttccgggacttgaaaatgtgaagatagtaagagatgcttatgccatagagtacgactgtatcaatgcaaaccagctatatgcatcgctcgagtttaagaaaatacatggtctgttcagtggtggacagttcaacggttcatccggatatgaggaggccgcctgtcagggacttatcgccggcatcaatgcagcaatgaagatacttggcaaaaagccattgatacttgacaggtcagaagcgtacataggtgtgttgatagatgatttggtcactaagaaaaatagagaaccttaccgcatgatgacttcaagagcggaatatcgactccttttaagacaggacaatgcagatttacgtctcaccgagaagggatacgaggttggtctgatttcaaaagaaagatatgactatgtatgtaaaaagaaagagcttattgataaagaaatagagagagtgtcgcatgtaaatatcggtgcaagggctgatgtacaggagattctgaagaaatacaacagtatagagctaagcaacggaaccacacttgaggagcttatcagaagacctgagctggattatgacaagctcgctccgatagatcccgacagacctaagctatctgatgacacaagagaacagattaatattcttattaagtacgcagggtatatttcaagacagatcaagcaggtctctcattttaagaagcttgagaaaaaactgttacctactgattttgattataatactatttcgggcttgagaattgaagcacagcagaagttgaatgaatttcagccgcttagtataggtcaggcatccagaatttcaggtgtcacacctgctgatatatcggttttacttgtatttctggagcaactaaaatactcaaatcctgatttattttctaggttaaacccggataatacaagcgctgagcaataaaaatggagaataaaatatgaaatatgatttcacacatttcactgatgaattatcaaaaattaaatgtacattaaataattcacaattagagcaatttgagctatattatgacatgcttatcgaaaaaaacaaggttatgaaccttactgccatcacagatttcgacgaggtaatagagaaacacttccttgatagtttatttttgtgccacacattagatttaaacgcggaaaaaaatatcattgatgtcggaaccggagctggatttcccggtattcctcttaagatagcttttcctcagcttaagattactttattagattctcttaataagagagttggatttttaaatgaagttattgaagcgcttgagcttaaggatattgaagcagttcatggcagggcagaggattttgccagagataaggaacacagggcagcttatgatatttgtgtatcgagagcagtcgcaaatctgtctactctttcagaatactgtctgccatttgtgaaaatgggaggctgctttgtgtcatataaatcaggtgagtgcgagagcgaggtgtcagatgcaaagtcggccatttatctgttgggaggaaagctggataaaatagagcagtttggctactcggataatcatcgctcttttgtcataattgataaggttatgaatacgagcaataagtatccgagaaaagccggactgccttctaagaaaccgttataattattatagaatagttataggcggtgctttattttagattaaagtatagaattagttagtaacaatttttttaataattgaagctgttttatccggtaactctaactgaggataaagctttgcatttgcaatatggatgatgtcgcatttactgtttagcttatggtaattgttgataacatccatattattttttattcctgttgatgctataattgatacatccttgtccaggttcttgagagcaggcgcgatattagtattgatgtagtttgataaaatgcttgagtaaagatatttgccgcggctttgccctttatgtgcggactcatagtatgcatccttcatcttatctgatatgagctggcttcttgaaataaatttatttctgaagagtaaatctactttgatagggctcataagcttattgtatataaatgtacctatgattggcagattaattatgttctgcttaaattttgtgttcttgtcaggtatgcatttaagctgttgtaatgatacagggtttataagtatgattttattaaataaatcctttgacagagcatttgccatgattacaggagctgttgacagattggttgcagctacgttaacaggctttccgattacgtcatttacaaaggctgtgataatctgtacatacatgtagcttgtatattggatggaaggcttgtccgagcggccacatccaagcaaatcaatagtgtatacggtattgttctttgcaagctttttagctacctttgcccattcttcaccggatgctccggagtcggtgtcgtgtattaaaagtattggctcaccggtgccggtttttgtataaaagatatttccttctttccatttgtagtagtggccattgtctactttgagtgaatttttcctttcggcattagagtctacaactctgttgtatatatgcattccggcaatcactgcagatgtgagaaaaagcagattttttgtactttttttcatattataacctccttgtttttatctgaaaaatttgatatattgattttgtattcttataactatattataacaaaaaagaagttttatacaattattttttataattgcttttaaatatagtaaaaatgatatataattatcctgtagataaattaattatacaaacaaatgttcgataattatggttaaacaatatttagagaaaacaagagatgaattttatgacagcaagtatgcgcttatagaaaaacttactgccgctgagaatcattttaaagaaaatatcaagattatacagatgcttgagggaaaatccgatgaaagctttgaggcttttactcctcgtgaaatcaattcatataataagagcaaagctaaggaaattaaggaagagcagaagctgattgagcctcagataaagtctttacacaaacagatttctgatattgattacaagattgatgaaatcaatagtgttatcagagtgtataattctgatgagacaactaatgaagtagaaatttcagaggccatatctgatgttatcaacgaagaggatagtgatgcttttaagagggtgattttacagactgtggagagtgagagacagcgtatcgcccgtgatttgcacgattctactgtacagagtctgacatcactcactcacaagacagagctttgtcttaaacttatggatgttgaccctatcaggtgccggcttgagcttacgtctcagggaaagatactgaaggatattatcaatgagcttcgaaatatgatttataatttaagacctatgtcatttgatgatattggatttaatattactgttgagcgtgctcttgataagcttcgcaattcaaataatataagatacaatttcaagacatccggtgatgagtacatggtagacagtcttgtgtcactaaccttactcagggtcattcaggaggcttgcagtaattctatcaagcatggtcatgccaaagaaattaatgtttcattaaagtatgaaccaaaatcacttactttgacaataaaggatgatggagatggttttgatacatctgctattcctgagtttaccagagatgataattcaggctttggattatctatgatgaaggaaagaatttatcttctttccggtaaaatatctatttcatcaagacccggtgaggggtgcatagttaaggtaattatacctgtaaataaggaggattaaattatggctattaatattatgattacagatgatcattctatgatcagagaaggactaaaaaatctgctggagcttgacggtgatataaaggttattgccgaggcagagaatggtgaggagtgccttgataaattaaagaccttcagaccagatgtattacttttggatatcaatatgccaaagatgaatggtcttgaggtattaaaagcattaaaggacagaaagtctaaggtaaaggtacttgttcttactggtcacaatgagacagaatatcttatgaaggctgtagatatcggaatcaacggatatgtactgaaggattctgagtctgctgagcttaaaaaggctattttcactattgctgatggtgagacttatatccagcctagtcttattcctgctctcaattctaagatgattcagaaaaatgaggatgagcttaagatagatgcccttactaagagagagatggaagtacttaaagagatgtctgttggtaagtttaacagagatattgctaaggaaatgaagattagtgagagaactgttaagaatcatatttcaagtattttcaaaaagcttgaggttactgatcgtactcaggctgcggtatttgcaatccgtaacaacattattcagattatgtaatatacgatttatattttattggaaatttattagaggaatgtttcacgtgaaacattcctttttgattatttgatatagtttattgacagtagtacggaatccgtcatgcatatacattccacactcattttactccgcaactgagagtatgtaagaaatcacatataggttgagacagtagtacgccaccgtccatatttgccatcgtggctcagtatggactcgctcgtacatccatgtacgagcgttgctatgtatagaagtgatttcaaacatactctaagttactgcgcaagtaacaaaagaaactcaacgctgtcaaataacttatgatggcgttgagtaggaaaatcttgggaagttagcatttaaatgaaatatcaaaacgactcccagttttttttattcgagctcacaaatcttatattgttaatatcaataaagttttatctctaagaattaatgaactttttttgccaaataacgttaccattcctgtaagtagaagttatctcacaaatataaagaaaaaattattagaaattgcacgatagaggtttttctttcattttataataacgtttacaatttacctgctcataaacaagtgctctttaaatatctcccgaaacagcttatcggcactccaaaatacattatccggtgtcacgacagccttacatccgattggttcgattcccgccttcttatattccgccaaaaagatatccatttgtgatgaattaatacctgaaaagaccagaagctccgccgggaaatcggctccgctataccttgaaccgtcctttttgaatccggttattccggctatggcaccgagcttctgtccgtaatctgatttttccacctgttgcaccgatattccgagggttttgcacagggcttttattttttccactttttgtgctgctacactaaataacagtattttttgcgtagatttctgctgcattcttaacatctcctacttcaaggttatatgcaagaaaaaactgctgcttacatgcaagcatgacgcatcagcttttttgttctcagcggttctgaatagttactgaattatctcatactgcatcagctcgtatttgagtctgcttccctccatgatttctggtgggagcagtgcccttgccacaagcttcagatcgtctgattcaatatcgcatctctttagatttgcatagtctccgtctatggacactacctcgtaataccatgtttccatgtgttttcctcctaaatttcattttctaaagcatctactgataattccaattcactttgttctttgctttactgtaagtggagcaggtgtaattgtcctgtgcattggtgtactttcatgtaggattaccgtttttgtccttcttttcataaccgccggtgctttgtgtcaccgctttgctcatcatcacgggataatctctcgtagagtgcagtgattttatttagttccggttgtttggttttcataagattctccttttaaaacaaacaaccagcttatctgtggttttattctaccacgaataagctggtttgtgtaaaaataattattgtctcactaataggcgattgatttaccatatatctaaactatcttcctaatccacccaagcctgcatctcgttatccaagaccaaccgggcatactccatagggttgtcaatggcaagagcgttcaatgcacattttgaatttggtgaaacacataaaaagctgctcatcaaatatcccccggataataatgtggaggatacaactagtacaccgagtaatattttccagctaaatacattgataaaatcgtacaaaatgagtataataatagtacgaagaaaggaagtggtgatatgtcaattacagcaactgaattgaaaaataatcttggaaaatatttattattatctgcaaaagaagatgtttttatcacaaagaacggaaagatagtggcaaaactgacaaatccacatcaggacagagtagaagtagcaaaatccctgtttggaatcttaccaaaggatgcagacctgaatgaagcaaaagaagaaaggcttggtgcaaaatagatgaggattcttgcagatacaaatgtgataatagatgccctgacttcaagagagccatggaataaaagtgcagaagaaatatttcttatggcagcaaatcatacaatcgaaatgtacattactgcaagttcagcaacagacatctattatcttataaggaaacatttgcataacatagaagcagcaaagatgataatgggaaagctttattcattgactggaatattagaggttacagcggatgactgcatggatgcacttgcatctgcaatcagtgactatgaggatgcagttgttgaaaaggtggcatccagaaaagatatggattatattgtcacaagaaatataaaagattatcaggcaggtggaacaaagataattctgccagatgattttgtgaaacttgttgaagaggaataatttttaccaccaaatcgtcaaataccgattttgttaaactctttctatgctccatcctctgccttattgcagtcgattcgtaaaagcatattatcactagaacgtgaaacacattacagcctcctgccgcatttgggacagaattcaaagtcctctgtagttgtatatccacaattgctgcatctttttattgtgcttccacttccattttcaaagccataaccatactgcgggtttacacgctgcaaatgctgtggcaatatctccacgtcctcgcctcttgctatcctgcgtcctatttccggatcaagctcgtaaagcgcattacagcatgtggtctgcacatagtagtgcctgttccatttaaaacacggaatgaagaacagtgacagcaccatgtatgtcatatacacctgatacctgccatacctgccacattcatcgcaggtaatgacctgattgaagtcaaagtccttcctgccgtccgttattcccatcataaaaaacatatatgatgcctccgtttatctgtgccatagtccccagaagtctccaagcgattctctcgtatgaaatccccgctcatcctcaactaccggtattgatttggcatccattttctctatatttacataagtaccctgactcaccattgcaaataccctgtctatctgctcctctgtgccctgtatttccataaataccgagccgtcagggtcatttctcacccagcctgttgcgccaacgctttctgccgcgtgctctgttctgtagcggaaacctactccctgcacagagccgtacactcttatctgctttctgatgattttgctgtcgtaatcactcatatgctcccacttccctgatacacattattttcagtctacaatagccctgcaaacagccgcataattgactgccccagccttcgccttgcacttcttcctgtcctgtacttctccgtcacctccgctgactcagtgaaaagccttataaaatcatccctgatttcatgcaccacttcacaatccgccataaaacagccattttcaaagtgatgataaaggcttctgtagtcaagatttatggtaccgcaggttgccattatatcgtctgccacactcatctttgcatggcaaaagcccggtgtccactcaaaaatcctcacaccatgcttcacaagctggttgtagaaggagcgtgtcacgctgtatattggtttcttatcaggtatgcccggcgtgatgatgcgcacgtcaactccacgcttggcggcaagtgtcagcgcatggctcatctcatcggtaatgataaggtaaggcgtgataaaccagcaataacgctgtgccttgtttgccatgctgatatagacatcctcacccacctgctcgttatcgagagggctgtctgcatatggctggataaatccactctgttttgcctcataatcatagtgtagcagatattgcgatacatccacctcgcgcggtaccttgcgctctgatgcattccacatctcgagaaatgcgatggtaaacgacttgacagcatctccctcgagcctgattcccgtatccttccagattccgtatgggtgtgtcacattgaagtactcatttgccagattgtagccgccggtatatgcgatttttccatcaattaccgtgatttttctatggtcacgattgtttaaaaacatgttaaaggcaggtgcaaccgggttgaacaccctgcatttgatgccaagcttctccatcttttccgagaaatccctgtctatgaaaaagattgagcccatatcatcataaaacacccttacctcgactcctgcctgcacgcgctccgtgagcaccttctggatacggtgccacgattccttgtcctctatggcgtgatactccatgaaaataaatttcctggcctttgataaatcgctaagctgcgcttcgagtccctttgacgcctgatcataatatgtcacatccgtgttctgatataccggatataatgcattttttgccaggtatgttgaaattcccgctgcctgtggcaccttttcatacatatcggatagtatgtctgcgttttcaggcagacatggaagaagcatggaatccacctcttcaaaccgtgcacgcatcttattcggtgcgccgtttagtccgactaacaggtaaagtgacactcccattatcggaaatgccagtatcagtataatccacggtgtagtcatggatgcggtctgctcacgattgtacagtccgagcacaagtatgattgccaggacgcttgtggtcgtgtttattgctgccgcatattcatttagccttgtaaacatatagaccatgaaaactgcctgcaataatatcgcaagcactgaaaaaaacattctctttaaaccattctgtgtttttttagttccctcgtaggttttttccttcatctgttatgcctccattatcttactgtctgtaataccaaacctctccataaatttttagccaccttcttatttaagaagccattcaatttcctctttataaggaggaatagtcttcttcgcagagccctcctcacaaagccatggtgtttccagaatctttggtacatttgcaaaggtctcatcatgcaccagtcggtgcagtgtatcatagccgatggttcccttgcctatatttgcatgcctgtccttgtgtgctccaagaggatttaagctgtcattcacatgaaataccgctatctgctcaagtcctatcaccctgtcaaactccgcaaaaacatcatcataatggttcacaatatcgtatcctgcatcatttacatggcacgtatcgaagcagacacgcagtctttctttcctgtccactccatcatagattgccttaagctcctcaaaggaacggcctatttcactgccctttcctgccatcgtctcaagtgcgataaacacatcgtcatcattctgattgagcactgtgttaagtccctttacaatctgtgcgattccagcctgctcaccggcatttacatgacttcccggatgaagcaccagtatgcggctcttcattgccgcggtccttactatctccttttccagaaactccactgccagctcgtacgtctcaggctttacggtgtttgccagatttatgatgtatggcgcgtggaccactatctcatttatcccatgctcatgtgcatattcccagcctgcgtctatgttgagctcaaagatttcctttcttctcgtgttctgtggtgccccggtgtagagcataaacacattcgcgccgtatgatgctgcttccctggctgatgccagaaacatatcttttcctgccatgcctacgtgacagcctaattttatatcactcatatttttcctctgtttcattgaatctatatatctattatttctactataacactacatccctgataactctatctaaatattctaaatttttactaaacatggcaaaagtcattgacatagtatcaaaaactacatatactatcctttgcaaccacatatattaatggcatataattgtaatgtatgtgatgcataactacagttaaccaattattataattaaaggggcagaataccttttgaccatcatatcattattatagaaatacgagggtaaatatgtttgaaataattgttgactctgcggcaaacattcctgcagagctatgtaaaaaatataaaatcaaggtgctatcatttgtaaaccttgtcaacggaaaggaaatgacctgctttgagcctgacctcacaccggaacaggagcgggcaaagggtaaggaatactatgatgcgataagagaaggtgctgaggtaaagaccggactcatcagcagcggaatctttgaggataccttcagggaaatcatagaggccgacaaggatgtcctgtatttctccctcagcaaaaacataagcggcaactacaactcagcccgtgtcgcagccgatgctgtccttgatgattgcagtaacggcagaaaaatacgcctggtggattcattaaatgcttccctcggacagggacttctcgcaatatatgccagcgaaatgcgtgagaagggcatgagctttgatgaggtggctgacacgatagagacctatcctgccagattaaacggtgtgtttaccgtgggcaatctaaagtatattgcaagaaccggcagattaagcggaaccaccgctttggttggcaacatgctaagtatcaagcctatcctaaggggcagcaaagacggatatattgtacagttcagaaaatgtcgtggccgaaaagccgtattaaatgagcttgtcaatctgttatgcgacaacattacagaccctgaaaatcagattatcggagtggcacatgctgacgcatatgaagattcgctctatgtgattgaacagattaaaaagcgcataaaggtgcgcgatgtgataaataccacctatgatttctgcaccggaagccatgttggtccggaatctttagcagtatttttcatgggaaaggacagagaattgggagcctgatatcaggctcccttttcacttcttttattcatcatcctcacataaaaaagtcccagaactcgcttattaagcggattctgagacttttgatttctattaattgcaacttctatctcattttaagctgcagctttcttgctttctgatttctcacagagcttcttcacaccctgaattgcaacaagcacaccaaggatgagcagtaatactgcgaatataagctgtaatgaatttccaaggtcaagtcctacagagaataatgcctttgtaagcttgtagattgtcatgccaagtgcagtaaatgtaactgccatcatgaataccattggaatccagagcatgcagccctgacgctttgtcttctttaagaatactgcgcaggcaacaagtgcaagtactgataagagctggttagctgaaccaaacagtggccatatctctgcatagcctacctttgtaagcaggaatgcaagtaccagtgtgatgattgttgcaaagtatttgtttgtcatcagcttgacaaatggactcatattgtcatcatctgtgtctgaatcaagccagaactcctggaatgacagacgtccgactctggctactgaatcaagtgatgtcagagcgaaggctgatacagcaaggttaatcagtgtgaacacaagtgagtgtggtaaaccgattactgacaggaagtttgcgatagctcctgcgaaaatctgtggctgtgttgtaagtccctgagctgctgcctctcccttaccgaatgatgctactgcgataagtgcaaggattgcaagcatactctccataagcatggcgccaaatgaaacaggaagcatgttcttctcattctttatctgcttagaagcagtacctgatgatacaagtgaatggaaacctgaaactgcaccacaggcgattgttacgaataagattgggaacagatactgtgggtttccgtttgcatcagggattgcaaatgctgtgaaagcatcaaggttacaagcaggatttgcaacaaatacaccgattatcgcacctacgatcatgaagattaacaggtagctgttaaggtaatcacgtggctgaagcagtgcccatacaggtgtaacactggctataagtatatatgcaaatataattatgtgccatacgctaaggtttaaatacattgggaaattgagtcccagtgctatagctactataagtaatacgattgcaacaagtgtgttaatccatttgttgaacttagagtatttaaggaagaaaccaagtgcaactgcttctatgatgaaaagcattgatgtagttgcaactgctccgttggctacaacctttgtaacctcgcctgctttatcagcagcaaagccattgaaggttccggctacgacatctgcgaaagctgcaacaacaagtatacagaacagccagcagaataacaggaataatttctttcctaatttaccgatgtactcctcgatgatgtaaccgattgtacgacccttgttcttaactgaagcgtacatagatgcaaagtcctgaacagctccaaagaatacaccaccaattaatatccaaagcagaaccggaagccacccgaaaatagctgcctgaattggtccgttgattgggcctgcacctgctatagatgcaaactgatgtccgaatactacattggtatcggctggtacatagtccactccgtcctccatctcgtaggcaggagtcttggcatttggatcaatgccccatttgttttgcagataacggccatataataagtatgctccaccgagcacaacaatggctattaccatcattaagattccactcatattattacctctttcttttgtttatcttaattttatttatatattatgtttactctttttttagcaaatttcaataaatattttatacataatttattttttatttctataatttttgtttaatttaccaatcggttataataggtattcattctctttatgctgtctttgtctcagcggcttcttctgcctttttagcagccattttgtcctttaatgcaaaggctccggcaagcagtgtgcctgagattgaatgccatgtacatgacactgcacagatgatggctgattcaggtgttgaagcaaactgtgctgtagtggtggcaaggtttgtggcaagacctgcattctgcataccaacctcgatagagatggttctcttcttggctgtgttcatgcctaccagctttcctgcaccgtatccgagcagatatccaagtccgttatgtaacagaactgccgcaaaaattactactcctgatgtaaagaactttgagccctgtgatgatacaacaccacctacaacgaatgccagaccaagcaccgcaatacccggcatgaccttctgagcctcggcaaatgcctttttctttccaagcaggtagttgagcaaaaatccaaccgctacaggaaagattacagtctcaatgattgacacaaacatcggaagtgccttgattgagacatgtgttccgcttgcaagcaatgataccagaagcggtgtcataaatggtgagagcaatgtggaaactgttgtcattccaactgagaatgccacatcaccaccgcagaggtatgacataatgtttgaagaaacaccaccaggacagcagcctacgaggataagtccaagtgcgattccgtcaggcagattcaatgcctttgagataccaaatgctagaaacggcatgataagatactgtgcgattgcacctacacatatatcaaatggtctctgtgcgagtatcttgaaatcctgtgtcgtaagtgtaagtcccatactaaacatgatgattccgataatgattgactgacatgtgaacttgttggataccggatccacaaacagcatctgatttacccaggccatcagattcggaaccagaaatgtgactacggcgattgctatgacaactatcgatgtgtagtctgataaaaatttacttactttttgtaatgctttcattgtaagcctccttaacatttttctgctcactaaaactcttttatggaattaaaaaatccctttccagattgacataatctgaaaagggacgaaataatccgcgttaccaccctgattccacagtgtattactgtgacactctgcataccaacatatgctttccatataacggtggacaccggcgaggtttacagacacacttaatgctttcagcccgcttcttagagaggatattccaatctgaccattacctgttcgcaccgcccacaggctctctgaaaataaatacaaatcggaccttgttctcatcaacgaattttggtgaacatatttatttaaatcttgttttgtattatagccctctgacactatatgtcaagagaatgatacaaatttgtactataacatttatttatagtttttattcatgtgctttattcttattatttattcgtaatctttgttgttatactcatcattccatgactgctgttgtgatgtaccgtaggaattttgagcatccccgccctgagctgcgccgtttccatacatgttctggccgtactgctggtttgtgccatttccgtacatgttctgaccgtactgctggtttgccccgtttccgtacatgttctgaccgtactgctggtttgccccatttccgtacatgttctggccgtactgctggtttgctccatttccgtacatgttctggccgtactgctgatttgctccgtttccgtacatgttctgaccgtactgctgatttgctccgtttccgtacatgttctgaccatactgctgaccgtatccgtttgaaccgtatggattatagtagttattattactattatatccatctcccacataaacaatgtttttgttgaaggcaataatacagataaaaatcacattgaggaatataagtccgcaggcaaatccggctcccttgccaaacgcatgtgacagtccgacacagcagaggatactcataaccaatgccacaatcattgctgcaataatcaggataaccgcaaatatcagcatgcccatgtgagctccgatgcggcttcctgcatatccataggtagaatcataatacgaccccatataactggatgtcataacagaaagtcctgatgcaataatctcatacatcaatataatacatcccactataattccgatagtagccacaagatatccccagaacagcttctttttccctgcaatcctgaatctcacgtatgagctgtaaaacggtacaatagccgcccagccgtgctctcctgcctttgcatacataatccatgatgcaacaattgtcagtaccataactgccagattgataaacgactcaaagccgtcaatcatactcataatagtataatatgtgctcattttttcttcctttcataaccaaagtttgtttgttattcaaagtatacatcaccataggtcagagcgcaataattaaaaagcttttaatacttttcatacaccacttttgcacccttgacaaaccccttcttaaacggctataatatcgtctattgaagcacaattacatttcaacaggctttgatgggaacaagtacatttctgcaatacttacagagagctgccggcaggtgagaggcgcaaggaaacagatctggaatacatcccggagctttgcaccgaacgtcataccggatgattaaatatccccggttcgattaataagccgcaacgtattggcacacgttatagtgccggagtgttagcagaatcggctattttcactatataatatatgtcgaataatgtgtgacaactcacggaggcattcctgtgcgagcaggatgcaaattaaggtggtaacgcgagaaatccccctcgtccttaaatggatgagggggatattttatttttcagaatacagattcaacttatcaggaggaaaatcatgacaatttatgacgaattagttgcccgcggccttatcgcgcaggtaacagacgaaaaagaaatcaaagagcttataaacaacggaaaagctaccttctacatcggctttgatcctacagcagacagccttcacgttggacatttcatggcgctttgccttatgaagagacttcagatggccggaaacaagcctatcgtgcttatcggtggaggtaccgcacagatcggtgatccatcaggacgtacagatatgcgccagatgatgacaacagagactatcaaccacaacgtagagtgcttcaagaaacagatgagccgcttcatcgactttggcgagggaaaggctatcatggtaaacaacgctgactggctgatggacttaaactacgtggatgtgctccgcgaggttggtgctcatttctcagtaaaccgtatgcttacagctgagtgctacaagcagcgtatggaaaaaggtctttccttccttgagtttaactacatgatcatgcagagctacgatttctacacacttttccagaaatacggctgcaacatggagttcggtggagacgaccagtggagcaatatgctcggtggaacagagctcatccgacgtaagctgggaaaagacgcatacgctatgacaatcaatctgctcctaaactctgagggcaagaagatgggcaagacacagtcaggtgcagtatggcttgatcctaacaagactacaccattcgagttcttccagtactggagaaacgtttctgatgccgatgtccttaaatgtatcagaatgctcaccttccttcctctcgaggaaattgacaagatggaaagctgggagggcgcacagctcaacgaagctaaagaaatcctggcattcgagcttacaaagcttgttcacggtgaggaggaagctacaaaggctaaagaggcaagccatgcacttttcgcaggcggagccaacaatgcaaatatgcctacagttaccgttacagcagaggacttccctgacggagagcttgatatcatctctgttctcgtaaaagcaggactttgcgattcaagaggagacggccgcagaaatatccagcagggcggtgtttccgttgcagatgagaaggtaactgatatctctaccaaatacactctcgacgatttcaagggcgagggtctcattatcagacgtggtaaaaagaaatttgccaaggttgtagctgaataattatgtaaaaaacttcgcattttaagatggtttcttttaatgcgaagttttttaataattttactgcggaaatccagtatgaaccatcatttttattctttagcataatattccccacactaaattaacataatgtacaatagccataggttgatagcaggcaggccttgggtagctgtaatccataaaacttctaaaacagctccccaatccagcccaaaaacaggaaaaattctggaaaaaagtagctgaaaccgctgaaatccccaaaacagctcccctaatcacagcaaaacagctggaaaattctccaaaaaagtagctgaaaccgctgaaatccccaaaacagctccccaaacccagcaaaacagccggaaaattctccaaaaaagtagctgaaaccgctgaaatccctaaaacagctcccctaatcacagcgaaacagataaagtccataagctccactttttaagatattacttctatttttgacgcaaagactaaatcatcatcacatatcgctatatttatcaaagtgttttcttcctttactgttttgttgatgctatgtttattttcaattatagcctattatccatcatttatatatattaaaccctactttttcctcatcttctcttgacttctcattaataagtgaatataatttacctaattgatacatcaacgctttaaagcgctgataaaaggaggaattatcatgaaaaagagatctaaaattttagcttcacttgttcttgccggaacaatggttcttggacttgccggatgcggagattccggttcagcaaacggtggcacacagtcaggcaagaactcagatgccaaatatcaggtaggtatctgccagctcgtacagcacgaggctctcgatgccgctacaaagggctttaaggacgcattaaaggacaagctcggagacgatgtctcatttgacgagcagaatgccgcaggagatgcttctacatgctctacaatctgcaccaagttcgtcaccaacgactacgaccttatccttggaaatgccacagcagctcttcaggccgcttcagcagccacagactctattccgattctcggaacatctatcacagactacgctacagctcttgatatgtcagactggtcaggcactacaggaaagaatatttcaggtactacagacctcgctccactcgatgagcaggctaaatgcatcaaggagcttttcccggatgcaaagaacatcggtatcatctactgctcatctgagccaaacagtatctaccagtcaacaactattaccaaataccttgaggacgagggatacactgtaaaagagtacacattctctgattcaaatgatgttgctgcagtaacacagagcgcatgtgatgcatctgatgcaatctacatcccaactgacaacactgctgcttcatgcacagaggctatcaacaatgtagcttcacaggctaagaaacctatcttcgccggcgaggaaggaatcgctaagggctgtggtgtggcaacactttctatcagctactatgaccttggatacacaacaggcgagatggcttacgatattcttgtaaatggtacagacatcaaaactatggaggtcaagagcgctcctaagttcactaaggagtaccttccggaccgcgccaaggagcttggaattacagttccggacggctatgaggaaatctcagctgaataaacagctgcactatggaggtatttaataaaatgattctaatgaattattttgcaaccttaaatccggttgcattcaccaatgcccttccgggcaatatagcccagggtctgatatggggcatcatggcactcggtgtttacatcaccttcagactgttggacttcgcagatctgacggttgatggctcatttgcaacaggtggtgccgtaaccgttatgatgacgattaacggctacaatatctggatttcactgctttgcgcatgtattgccggtctgctcgcaggactctgcactggtctcttacatacaaagctcggcattcctccgattctggcaggaatccttacacagatagcgctctactctatcaacttaaatatcatgcagcgccacgccaaccaggcacttagcgcagataaatataatctggtgctttcatcacgtaacctgacacatgcgataattgtcggtgtgattttctcggttgtaattatcgcggtgctttactggtatttcggaacagagcagggctctgctatccgtgccactggctgcaaccctgcaatgagcaaggctcagggtatcaacattgacaacatgaagctcataggtcttgcgctttcaaatgcaattgtagcgctctcaggcggcctgctttcacagtactcaggcttttccgatgtaaacatgggccgtggtggaatcgtcatcggtcttgccgccgttatcatcggtgaggtgctcggcgatgcaatcctcggaaagcacatgaatttcatgggaaaacttatctttgtcatatttggtggaattgtttactacattgtaatcggaattgttctgtggctgcagatgccaagtgatgacttaaagctcttcactgcaatcatcgtggcaattttccttgcagtgccttacctgaagggcaagagcaaggcctccttcaaaaaggccggcaaacgctctgctgcagcacttaacgcaaaggagggcaaataaatgctagagattagaaacgtacataaaaccttcaatccgggcacaatcaatgaaaagcatgcccttaatggtgtaaatttaaagcttgaggagggcgatttcgtcactgttatcggtggaaacggtgccggaaaatcgaccatgctcaatgccgttgcaggcacatggcctgtggacgatggttcaattctcatcgatggagtggatgttacaggacttccagagttcaagcgtgcatcatttctgggacgtgtgttccaggatccaatgacaggaactaccgcaaccatgcagattgatgaaaacctcgcacttgcagcgcgccgcggaaagcgccgtggtcttggctggggtatcacaaaagctgaaaaggagcatttccacgagcttttaaaggagcttgacctgggactcgaggatcgaatgacctcaaaggttggtctgctctcaggtggacagcgtcaggctgttacactgctcatggcttcactccagaagccgaaggtgctgcttttggatgagcacaccgctgctctcgaccctaagacagccgcaaaggtgctcactctcacagacaaaatcatcaaggagaacagcctgacagccatgatggtcacacacaacatgcgtgatgccatcgctcacggcaacagactcatcatgatgaataacggacaggttgtccttaatatttcaggcgaggaaaagaaaaacctcactgtggaggatctgctcatgaagtttgaggaggtttccggcgagaaatttgcttctgataaggctttgcttggatagacatatctatataatgattaaagggtcaaaaggtatcatcgatgcatgcttgcatgcaattcgatgtataccttagtgacccgcactacaccgtgtaaacgaaggggcagttctctgcaatgtcaaaactgctttttcgtttaccccatcatcgattgtaacctaaagaattttcttaattcttcatcgctggtttttttcttttccaattaatcagtagaccaatcgaggaaataacaaaaattaatgccgatgttaaagaaataattccatcagtaaccacaaatatgataaacgtggctaatggaatataattaagaatacttttcaaaattttcatgtccaatcctcccttaggtttcataataggtttttctttattttaccacatgacaaagggtattggtattgttattttcgttctttgatgactgattctatgatatttatttcttcatcagtaaggttgtattcttcgtaaagctcttggtctgtaaatatatgcttatttccacctgccttataactaccttttatgatataatctaaaaatcttaaaattttttgtaacaaaacaatcctttctacgtctaacctatgaacgaaggaggtgacagttctggattatgagaaattgtacaattcctattacttgcaagtatactcatatgtaatgacaattgtaaaaaatcaacatcaggctgaggaaattacccagaatactttttataaggccatgaccgcaaaaaaggcatatgccggcaaatcaagcgaacagacctggctttgcagcatagccagaaatctggcaatggacgaatgccgaaaaaccacaaaatttacagagcttgacgaagagcagctcgaacaacccgataatatggtaaaaagcctagaaaataaagatacagctcttcagattcatcttatactgcacgagcttgatgagccatacaaggaggtctttcagcttcgaatatttggtgaattgccattctcccaaataggcatgatatttggaaaaacagagaactgggcacgggtaacttaccatagggccagactgaaaatcaaagaaaggatggatagaaatgaataatccaattacacaatcaaccgatgaaacctgcaatatagttcaggatttactcccactatactatgatgatgtatgcagtccctcaagcaaaaggcttgttgaaaaacaccttaagacttgtgaaaaatgtcaaaatacatacaatgagctaaaaaacgattctattgattcaatgataaaaaaagaggccgacagtgtattaaagcagcatgagaaaaaggaaaaatctgctgcctacaagaccggagtcataatagccggattactgcttatcccaatactcatcacattcatagtatgcctgtcaaatggcggtggtttaaatacctttgcggtggtaacagcatctatgcttcttgtagctgcaatgacagttgttccacttatggcacagcagaaaaaactgaccaaatgcataatctgcagtgtttttgctctgcttttgatattcttttttgttgacagaatgtatagttcaaatgaatttatgctttggtctgttccaactatatttggattatcaattgttctttttccgtttgtcatcagaggaattgagcttccacctgctttgtcagacaaaaaagctcttatcactatgctgtgggataccttatggcttttcctcacaatcattgaggtgtgtggtcatacaaacgatgttgccggaatgaaggccggctgtattatagcatttgtctttgtacttgcagcctggctcatattctttgatgcacgatatttaaatgcaaacggatttataaaatccgcaattatagttttgatagcttcggtttggacagcttttgccgatgacatatgcgagtttttaatttttggcaccagacaaatcactataaagtctgtgaatttttctgactggacttctaatatctgcgtgaatgccaatgtatacgctattgtacttgtgtccggtgttatcatcgcctctatactttttgtagcaggcggtattaaagcatttgctaataaaaaataaattagttttctctttgaaatattattacaaaacccctcccacagatttctatctgtgggaggggtttttatagtcattattcaataagtgcctacagattagcaaacaccctgtgcaagcatagcgtcaactactttctcaaagcctgcgatatttgcacctgcaacatagtcagtctttccaccaactgttgcattgtatctcttagcagcatcactgatgttagcgtagattgtctccatgatacccttgagctttccgtcaacctcttcgaatgtccatgaaagtctctcagagttctggctcatctcaagtgctgatgtagcaacaccacctgcattggcagctttaccacctacgaagagtactccgttctcctgaaggtattttgtagcctcaagagttgtaggcatgttagcaccctctgttacagatgtaacaccgttagcaacgagcatcttggcatcctcaatgtctaactcattctgagtcgcacatggaagagcaagatctaccttgtactgccatacaccgtgctcaccgttctgctttgcatgatactcagcagttgacttagcagctgcatactcagtaagacgggcacgcttaacttccttaacttccttaagaagagcaacatcaattccgtttggatcataaatccatccggtagaatcagaacatgttacaaccttaacacctaactcctgtgccttctcgattgcgtagatagcaacgttaccggatccggaaactgctgctgtctttccctcaaggctcataccatgatctttccataatgcgttagtaagatataacagaccatatccggtagcctgtgtacgtgcaagagatccaccataggtaagacccttaccagtcagcacaccttcgtatgatccacgaattctcttatactgtccaaataagaagccgatctctcttgcacctgttccgatatctccggccggtacatcaacgtctgctccgatatatttgcaaagttctgtcatgaagctctggcagaatgccatgatctctctgtcagatttacccttaggatcgaaatcagaaccacctttaccaccaccgattggaagtgttgtaagagaattcttaaatacctgctcgaaacctaagaacttgataatacccaggtttacagaaggatgaagtcttaaacctcccttgtatggtccaatggaattattaaactgtacacggaaacctctgtttacctgaacctgtccgttgtcatctacccaaggaacacggaacatgatctgacgatccggctctgtgattctctcaagaatcgcattctttctgtataattcctcatttgcatcgattacaggtcttaaagaatcaagaacctctgttactgcctgtaagaactcaggctgatctgcgtttttcttctttactacttcgagtacttcatcaacatagctcatttttatatctcctttacaaaattatttttcacatcaacaagtttattttatataaatctattgctataatcaagtaatttttgaaagttttatataaaaaaaattcattttatttattatcttcatttatattatcccagttttggtactgattctcctcatcatcggaatataccaccttgaaataatccgagagttttgcaagtgaagttataagaactttcatttcgtcatccgaaagatcgtcctttatatgctctatcatatgacggtgaaactgctcatgatgatagtatgcactctttcccttgtcggtgagtgagagctttaccacacgcttatcctcctcactgcggatacggttcacgtatcccttgtgggtgagaccatctattgcctttgtcagcgtgcccagagtgatagacataagcttggctacggtgcctgagcgctttggctcatcgactcctattgcctctattatatgcatatcgttgatagaaatatcagaaaattcgtctgttatcagacatctgccctctatctctgtcaaatccttgaacagacacaccaataattcatttaaagtttcatctgccgtcataaatacctctttctattgccactctatggcgctggctccccatgtaagtcctgctccaaagcctgataaaattattttttcctcatgctttatcataccatctttgcggactttatcaagcaaaatcggcacacttgccgcagaaatatttccacactgctgtaaattggtcggaaatttgtccataggctgcttaagcctcttggcaaccgactcaataatacggatattggcctgatgcagcacatagacatccacatcatctgcgctccagccgatttcatcaagcagctcatttatagcctttggcactgtctttaccgcaaacttatatacagcaggaccgtccatggtgacatagccaccgagtgcagactgctttccattgtcggtaaacggattgactactggacggttgtctccgtcaagcgcctcaccgccttttccgtcagaaccctgtacaaagcccttaaaagcatcgccctcgtctgtcacaacggctgctcctgctccgtctccgaagagtacacatgtgcttctgtcattccagtccattatttttgaaagaacctctgctcccactacgactgccttgtgaaatctgccggtcttaaaatatgcatccgctgtggcaagcccgaataaaaagcctgagcatgcggcatttatgtcaaatgccactgcactgcctgcacctatctcagcctgaatctgacatgcgagcgatggaacgattttgtctgtggatacgcttgccgctattatcaagtctatctcacttccgtcaattcccgcatcctgcagcgcactttttactgcatcacaggccagtgaggttgttgtctcagtagttgcaatgtgtctgtttcttattcctgtacgcgagctgatccactcgtcagatgtgtccattatggctgccaggtcatcgtttgagaccactctctgtggcaagcagcttcctgttccaactatcttcatagaatttcctttccgggactagaacttgcggaaacgcttgtatctttcctccaagagctggtcctttgtcaatttgctttctttttccaagaatttcttcatgttgcccttcatgtagtttccgattgatgaaagggcatcctcgtcggctccgccaaactcaggtattatatcatccacgacatcaagctcctttaagtcgtgtgctgtaatcttcattacctctgcggcttcctttgcacgctttccgtccttccagaggatagatgcaaagccctcaggcgagaggattgagtatgtggcattttccatcatccacacttcatttcctacagaaagagctaaagctccgccgcttccgccttctcctatcatgagacaaaggattggcaccttgatgccactcatctcataaaggtttcttgcgattgcctcaccctgtccgttttcctctgcttccattccaggataagctcctgatgtattgacaaaggttatgatcggacggttgaatttctctgcctgcttcatgaggcgcagtgccttgcggtagccctcaggtgatggcataccatagtttctctttgcgcagtcctcaaggtcttttcccttgtgaacaccgataaccgtgaccggctggccgtctaaatatgcgattccacctacgatagccgggtcatcgcggaaatatctgtctccatgcagctccataaactcatcaaagatatagcccatatagtcaaccgatgcaagtctcttaatctgtcttgcggcgctgaccttatcccataccttaaatggcttagcctttgcctcgcgctccttcataagctctgtcggctcgtaattgtcgtctgagtgaagcgggtcaaaattggcatagccagtggtaggtctgtgagcacgtaaaatcttgtaaagagtcttctttaaatcctcacgctcaactatcatatcaacaaagccgtgctcaagctggaactctgccctctggaagccctcaggcagcttctgtccgatggtctgctcgataacacgaggacccgcaaaaccgataagtgcctttggctctgcaagaatgatgtctccaagcattgcaaagctggctgtcacaccacctgttgtaggatctgtgagtacaggcacatataaaagtcctgcctctgaatgacgctttgctgcggctgaggtctttgccatctgcatcagtgaaatgataccctcctgcattctggcaccgcctgaacagcagaataatataaccggaagtctttcctctgtggcacgctcaaatgcgcttgtgattttctcaccaaccacatgacccatgcttcccatcataaatcttgaatcaattacaccaagcactgtctcctcaccgtaaatctttgtcttaccgatgacaataccctcagaaagtcctgttttctcctgagtctttgcaattttctcctcatactctgggaaattgagaggatttcctgttgtaagctctgtaaaccatggctcaaatgcttccttgtcggaaaccattctgattctgtttttagcacgcacacggaaataataattacactcatagcagacgtatttgtgctgttttacaactgatttgagcacagtcttgccacacttgggacaaacgattgtctcagggacatcctcttttgtttcctgtgctgcaccggcatttttgccatctgcggctgtttttgcgctctcagcgttctttgctaaagcctcatcagcctctatatttttatctttcttcttgaataacttcataatgtctccttatgcaattaacctattgcaaatgtaagctccgccatacaggcaaccttgccgtttaccctggcaacagccttgcccacaccgataggacccttaacctttataatctcagtggtcagctccagcgtatctcccggaaccaccttctgcttgaacttggcattattgatgcctgcaaaatatgcagtcttacccttccactcatcctgacaaagaatggcaactgcaccggtctgcgccaaagcctcaataataagcactcccggcatcaccggatttcccggaaaatgtcccataaaatgtggctcattcatagtcacattcttcttagccacacactttacgcccggctgcagctcctcaaccgtatcaatgagaagaaacggactgcggtgcggcagaatatccataatctgctgcgtattcaaaactgacatattgcatatatcctttctcaacttactgtaaactatttacattcttcgagctccacaaagtggagcaatgaagcacaaagtattccataaacctaaactgcgcacatgcttcgcgctcaataacgtggagccgggaagcacacagtgtgttctgaatgaaaaatatggactgtcacggcgttccatccactccaatagcatgaagcactaacaccatatcacagcctgtccgtgcaaaatgccgtgactgacttcatatttttcacgaggaatatactgtgtgctccccggacctcacagcctacattcgcgaagcccctaaaaaagcagaagctatttatttataagccttgagcagaatacttgcattatgtccaccgaatcccagtgaattgctaagtgcatactcaacaggctcctcatagctgtccttgcagtaattgaggtcaatctcctcatcaggagtctcatagccaacagtcttatgtataaatccatcctggatttccttcacacatgttataaactcaacagctcccgctgctccgagcagatgtcctatcatagactttgttgaattgattttaagatttgcagcctcatcaccgaacgcaagcttgattgctcttgtctcaaagagatcattgtgatgtgtgcctgttccgtgagcattgatgtattttacatctgccggtgtgacacctgcatcgctcatggcattggtcatggctcttgctgcacctgcgccatcctcctgcggagatgtgatatggtatgcatccgatgagcagccgtatccgactacctctgcataaatctttgcacctcttgcctttgcatgctcaagctcttcaaggataactactcctgcgccctcacccattacaaagccgcttctgttcttgtcaaacggaagtgaacactttgtcggatcatctactgtagaaagcgctgtaagtgctgtaaatcctgcgattccgataggacatacactgccctctgtaccaccggctaccatcacgtcagcctcaccgtactggatgcttctgtatgcctcaccgattgtgtttgttcctgtagcacaggctgttacatcattgatactctttcccttgagaccgaactggatagaaacatttcctgctgccatgttacagatcataagcggaacaagcagaggattgactctgtttggtcccttttcataaagcttttgtgtctcgcgctccatagcctgaagacttccgacacctgaaccgatggcacatccaaccatgtatggatcttccttttcgatatcaagtccgctgtcatcaattgcctgctttgctgcagctacagcgtactgtgagaatggctccattctctttgctgcctttctgtccataaaatcctgtgggttaaaatccttaagctctgctgcaatgtgacatttataatctgttgtgtcaaattttgtgatgtggtcaaatccgatttttccggcctttaccgctgcccagaaatcgtccacattatttccgattggtgttactgctccaagtcctgttacaactactcttctactcatattgccattcctccgtcaacagacagcacctggcctgtgatgtagcctgctgcatctgatgctaaaaataatactgcgtttgcgatatcctttgtgtttcccggtctgccaagcggaatctgtgataaaagattctcctttgccgcatcggcaagcacatctgtcatctctgtctctacaaagcccggtgccactgcgtttgctgtgattccccggctggcaagctctctggctacagcctttgtgagtcctataactcctgccttgctggcgctgtagttggcctgtcctgcatttccgagtatgccggaaactgatgaaatattgataattcttcctgatttctgcttcaagaaatagcgtgacatatgacggattgtgttgaacgcacccttaaggtttgtgtcgagcactgcgtcatagtctgcctcgctcatcttcatgatgagaccgtctcttgtgattcctgcgttgtttacgaggatatctatgtgcttgtactccttgatgagcgctgttatcatattctggcactcgtcaaaatcagatacattgcactgataagaaactgcatcaccgcctgctgcctttatttctgcaacaacggcatctgccttttcctttgaaccattataatttactattacaaaggcatgtgctgcggcaagtgtaagagctatctgtcttccaattccgcggctcgcgcctgtaaccagggcatttttacctgttaacatacttttcaaaatcctccagtttgtctatgtttacgacttttacgtctctatttatctttctcataaatccgctgagtgatcgtcccggtccgatttccacgaactcatctgcaccgtctgcgataaggcgctcgatggtctgctgccagcgcactgacgatgaaacctgctttgtcagataatccttgacgtctgccggtgacttcacataatctgctgtgacgtttgtgatatatggcacctcgatatcgtggatttctacactctcaagtgcatctgcgagcttttcgcctgcgcccttaagcattgctgaatggaaaggtccgctgaccttgagcggtacgcatctcttggcgcctgcctcgctgcatgctgctgcggcggcatctactgctgccttttctcctgtgataacaatctgtcccgggcagttatagttggctaccgataccactgaatttgtctcatctgctgtctttttgcagatatcctcaatgacctgcggatcaagtcctaaaaccgctgtcatggctccacctgtaggaactgcctcctgcatgtagattcctctttttctgacaactgcaaatgcatctgccatagtcatggctcctgatgcgatgagagcaccatattccccaaggcttaatcctgctgtgacatcaggtgtgatacctttgtcaatgattgcctgatatatagctgcctcaactgcaagcatacatatctgtgtgtactctgtaatattcagcttgtcattttcctcaaagcaaagtgccggaatatccaagcctgtctgttcactggcaaggtcgattactgcctttgcatttggcattgtatcgtaaaactccttacccattcctatatactgtgagccctgtccgggaaacataaatactctcttacccattttcggtttctccttatttctgacaggataccgtaagccactcttttcaggcgccccggtatccttaaatttacatgtaaaagtgaatactgtctatttgttcagtcccactacatcctcaatgatttctttgcaggtttcctctttctttacgaggcctgcgctctgacctgccatgacgctgccatatacggtatctccgtctacaacggcttttctgagtgcgccaagtgtcattttttcgagctcttcaaatggagctccttccttttccagcttgagatattgtctggtcatcttgtttctgagtactctgatcggatgacctgtgctcattcctgtaacctcagaatctatatccttggccttaatgaccttctgcttatagttttcatgtactatcgattcttttgcggtgacaaagcgtgtccccatctggactgcctccgcaccgagtgcaaatgccgcattaaagcctctgttgtctgcaattccgcctgctgcgataacagggatgctcactgcatcaacaacctgtggcacaagtgtcatggtagtctgtgctccgatatgtccgcctgactccattccctcggcgattactgcacttgccccgcctctctccatgagctttgcgagtgctacgcttgcaactacagggattacgatgacgcctgcttctttccacatatccatgtactttgcaggatttcctgcgccggtggtgactacctttaccttttcctcggcgatgatttttgctatctcatcggcctccggattcataagcatgaggttgactccgaacggcttatctgtctccttctttgcagcgactatctgctcctttacccatgaagccggggctccgcctgctccgatgatgccaagtccgcctgcattggacacagcgctggcaagctcatgggttgctacccatgccatgccaccctgaatgaccggatatttgattccaagaagctttgttattcttgtctccatgtcttttaagcctctacacctttgttcttaagatactcaatgatgtcgttaactgttgcgattttctctaaatcctctgaagggatttctactccgtactcctcctcgagtgccattacaagctcgaaaagatctaatgaatctgcctcaagatcctccttgaagtttgactctaatttgatatcatcctcgtcaattcctaactgatctgctacgatttccttgattttctccaacatatttctgttctcctttttctgtgtttattttcgattttgtgtgctggtatttttgcactagtttgcatgtcaaatattttcatcatcaaatcatttgacagtgaaagtatatcacattttaaatagttgtcaagtcaaagtatttttatttttcattttttatatggtacgggagcaataatatacaataaaaaaagcaggacaagtatttctacctattctgctcatttttacataatttaattgtttagatatagattatctaccggctgttcgccatctacttcacatagtcgagtgccttcttaaccggtgggattgatatcactatgattgtgataattccctctgcagcaaggtatgaaccattgtaggtcactgaatatatgagcgcatctatcgtcttgtttcctatcgtgacaggtgcgtatgctgcaaagaacacaactcccgacagcactgcaaagaaaaatctactgggctgctccgcctccggtggtaccaccggtagctccacctgtgttgtccccggtattcccacctgtgttgccaccattattttctccggtatttccgcctgtgttaccaccgttgttttctccggtatttccgcctgtgttgccaccgttgttttctccggtatttccgcctgtgttaccaccgttgttttctccggtatttccgcctgttgttccgtctgtattgtctccggtatttccacctgtgttgccaccagcagcatctgtcttattcgggtttgttgtggtcttatccggtgctttagttcctgcatcaggtgtggtcactgtctgatctgtaggattattctgcgtctggtcatcggcaggtgtatcctgtgtctcctggctgtcctgataatcatccgatatttgagcatatggcaggaaatctattggtgtaaggtcagcatgtatctgatccatgtagttcttccatatttctgccgggtaagagcttcctgtcagctttttgactgactcaggcatatcacagcctacccatacacatgtggtgtagtatctggtaaagccacagaaccagccatccttcttatcgtttgttgttcctgttttgccggcgcaaggcatgccattgtccagattagcgctacgtccggttcctgatttcataacatctgtcatgacatctgtcatcatacgtgatgctgtctctgtatatatgatggtttccttctgcgatgatgtatatatgatattgttgtcagaatccacaatcgactttatacaggtaggattcctgtacattccatcgttctcaagtgttgaatatgcagatgccatctccagtgtggatacacctgttgtaaaacctccaagtgctgttgctgtgacatagtcatcctttacaatattggtaaaattcatatccttgagatactgtaagcctacctttggtgtgagctcatcatatagctgccatgctacagtattcagtgacttttgaacggcaaacctgatagtcacatcaccgtaatatgaatcacccgagttagacggtcctccatcaaacttgtggtcatttacgacggtatccggtgtcttaccacgctcaaatgatggtgtatacacaatgagtggcttgattgagcttcccggctggcgatggctttggaaagcacggtttagcgtatgactgaccgcatcctggcttcgtccaccaactattgcaaccacctcgcctgtgtcgttgtctatacaggttgcagcactctgcagcttaaatgtgccatcatcggtcgtgtctgtaaagtccaaaagcgtcaggtcaattgaatcctgaagctgctgctgcatagtcagatcaattgatgtataaatcttgtaaccgtctgagtaaagctttttctgacaatatgaatacatctcatcatatgaagcatcatactccttttcttcatcgtctgagtcaaagtaatacttgaacttgaagccctcattctccatgagcgccctcgtagcgcagtaatatgcataggtatccacataattgtacttgaccgtgtcatctttctcaggcatattgagggtaatctcctcgtttatggcggcctcatattcctgctgtgtgattttgccatcttcctttagatttttcaatatgagattacgacgtgtcaatgtatgatccttattgtttatcgggtcatagtatgtcgggctgttcggaatcgcacacaaaaaggcagtctgcgacaaatcaagatccgaaagctcacagttaaaatagccatggcacgctgcctgaataccataatatccgttcatgaaatagacattattcaggtagaactccataatatcgttctttgaatatttcttttccagcgccatcgctatgaacatttccttgacttttcgctgccagttcttgttcgtatccagataaatatttcgggcgagctgcatcgtgatggtactgccaccctgggtaattctcttgttttttataattgactttgcggcacgcactattgcctttatgtccacaccattgtgcttatagaacttcttgtcctcgatgctgaccatacagtttacgaagttctgcggtatatcctcatacttcacatagtcagcctttttggtagtggccgtctcggatatctcatcaccgtttgtatcgtagagtgtactcgtgcgcgccggtaaaaatgtgtttttgtcagatttctgcacgagctctaccgcctctgagtgaagcttcgcaaccttgtctgcatagcctccaaagtaataaaagcataatccaccgagaatcagtaccatcagaaaaatctgaagctttatgaaaaaccagaaaacgcgatgctgctttttcttctttttctttttctgttttgccatttctaaacgttacctccaaactatcggtataccattgtatatcggcatactttatagataattgacaactatatccaatatgtactgtctattatactacaatgcctcaacatcagataattaataattgattaattttctattatacctttatagcacaaaaggaagctaattgctccctttatcaaactattttacatctttattactgttgtagtcaagtaaatagttttttacaatgcttttcgctatctctagccaagctggtcagccagaaattctgctgctgcacccgccagcttttcggcaatctcagacttatcggctttttcatcgaaggtacatagtataacggctcccgcactatcaccatcatgcactattactgctattgcctgcgcttcacagtcagctttatcgtccttcaccacaggtatcagggtatcgtcttttttactgtacaatgcactttttctcttatccataatattctcgagttcttttgacaaagccttgcctatataatttttgtggtttttgccggctgccgctattatctcatcccggtctgccacacataccgtggcaccggttacctttgacaggctctgtgcatatgcctgtgacatattcttcaggcttcccacctgcgaatatttctttagcacgatcgtctcgtctgcatccatatatatttccagtgggcttccctcttttatatgcagcatcctgcgaagctcctttggtatgactattctgccgagggaatctactcttctggtcaatcctgtgattttcactttattgtcctccggttacttttttgcatttgcattcatgctttggaggtagtatatgggaatttgaataaaatatacattcgatatgcactgatacagtgctctttcataatagtttttataatgtcacggtatgttttgaatttgataaggtatctatatccatcagctcacgctcatctgcgatatccacatatacacagtcatacttctttgccacacttctgccacccttatcaccctccagtgataaaagctgcgggataagcgatgaatgaaatacacacggattgcctacagcatctccacagcgaagcgaaaaagccaatcgcatattccctttattttcaagtactttgtctattaatttaatcacgctttgactttttaaatatggctggtcagctactgcaaacatgtagtagtcctctgtttcggctgtattaagtaacgagccactgtttttttccggctttttctgccacacactgctttgcaacatctgcataccggtctttttctgctcctgcacagccataattcctgcttttatggtgtaggatatgcctttttcgctgtccggacttaagactgcatggcaatctgggatacatgcgcagtagtccagtatttcccggtaacgtgtaacgacggttatatctatgaccgggttattcgattctgcattttttatcttttttccagccttttttaatttattatatctatctttaatttctatcaaacgttcaagcagatgcctgtacataggttttccatccagctcataaaacagcttgttacttccaaaacggcggctgtttccagccgccatgtatatgatatgaatcatttcactcttagatccttttcgtgccagtcagggtctaccattcccataagtattttctcaggggtaaacggaactgtcctgtgccacacacctgttgcgcgataaatggcatgtgccagtgcaggagccggtgtattgataactatctcgccgattgacttgactccaaatgggcctgaaggctcatagcttgtctcaaattcgacgttgatatgtcccacatcctgtcgtgtcggtatcttgtactgcatgaaatcattttctgcgattttaccaccggcattgtaggtaacattctcataaagtgccatgccgattccctgacctatgccaccctctgtctgtacacgcgcaaggtttggattgaccgggattccgcagtccacgacagcctgataatcaagtattttaactgctcctgtctccttatcaagctctatctcgaccatgcctaccatgtatggtggcggtgaaacaggtgatgaatatgtggcggtgacatctacaggtatcgtgttgttgacctgtgattttgttgctatatcggaaagacttacggaaactgctccattgtctgtaccgtccggatttatgatatacacctctttaccgtcgaaatccacctctgatgcagtacagcccagcatctgtgcaccgattttctttatattttcacgaagctcaagtgctgcattctgtgtggccattcctgtgatgtatgtggttgatgaggcatatgaacccgagtcataaggagaagcatctgtatccgctccaaacactgttatatcatccggctcgcagtcaagtacctcagccgccatctgcgcaagtattgtatcacagcctgttcccatgtctgccgcgcctatcatcatattgtaggtgccacagtctgaaagctttaaggtacacgagccaacatccacattggatatgcaggagccctgcattgcaagtgccatgcctgccgcacgaaccttgccatttcccatgtcgcggacaggatacttttctgcccagtggaaattgtccgcgcagtgcattatgcatctgtcgagtgcacatgcatttgctgtctcgccaaaatatgccggcataaacatgccctcgcgtacaatatttttcaaacgaagctcaaccgggtctatatgcagcttttctgcaagctcattgaccgttgattcaagtgcaaatataccctgtgtggctccatagcctctatatgctcctgccgcctgcacgtttgtatacacaacatcacatgaaaatctggttgcctcgcagcctcctgtataaagcggaagcgatttatgaccggaaagtcctactgttgtagtgctatgctctccgtatgctccaccatttgacagcgtataaagatctatcgcccttatatgaccatctttcatcgctccgagacgcacggtgacttccatctcatgacgcggtgacgtgatagtctgacactcttttctgctgtagattatcttgctcggacgctttgtcttccaggtaacaaatgccggatacacctcacagaccgctgtctgcttggcaccgaaacctcctccgatacgcggcttttcagcgcgcaccatagactttggaatatcaagtgcatttgccagtattcggcgcaggtgaaaaacaatctgtgtcgagctgatacagtgaagtctgccgtatctgtctatctcacagtatgccctgcatgtctccatatatgcctgctgcgcggcctttatgcgatatgtgtgctcaataatctcatcgcactctgacagaattttctctacgtttccatgctcatcctcctcgtgatgaatgagattgcgctttacatcgcctgtatctatgctggatgaccagtcatcctcaggatgcacgagcaccttattatccagcgactttctgaaatcaagcaccggctcaagcaccgtgtactttacttttatcatgttaagagccttgtccaccgccttttcagattctccgaccactatagcgacggcgtcacctacacttctcacatggcggtcaaggattaatctgtcatatggtgacggctccggaaaagtctggcctgcgatagaaaaacgctttttcggaacatcctcccaggtgtatactgcgaccatgcccggcaccttaagagcgatatctgtctttacatcctcgacaattgcatttgcatacgggcttctaagaagctttatgacaagcgcatcacgcggtgtgatatcatcggtaaataccggctttccgagtaaaagctggctcgaatcctttttaggtatacattttccaactgcgtggtaatcccttctggcgcggttgaagctgttttcgttagtttgatttgtgctcatcctgccactcctttccgatatcctctccgtagacacctgcctcaagattaagaggtgcgccctctttcttactgtttaagaaatttctgattgagcgcagctgactctgatatcctgtacaacggcacagatttcctgaaagatattcaagaatttcctcatcagtcggatcaggattttctctcagaagcgccacaatatttacaatataacccggattacagaagccgcactgatccgctccctgtgcagcaaaaaatcctgtaaactgtttagcttcctcctcaagtccctcgagggtgtccaccgctctgccgtctgccctgcctatcggcgtgctgcatgacagcacaggctttccatccagaagcactgtacaaagaccgcagttgcctgactcacagcctctcttcaccgaaaagcaattgtgcttgcggcaaaagtctaaaaggaccatatcctggtctaccgagtcggttattaactttccatttaattttattttaacatccatatatatgaattccttcctacttaatgctcgtgcttaatttcatcgcaaatgtcaagcgactgtgtgacagcgcggcgtgtaagcaccctgcagattatctctctgtactcggcgcctgcccttatattgcttccaaaacggatatgctctgcaacatatccggcaaatttatctattttggcattgttttcggagttatctgtcaaagctgcattaccgtctgtctttgcatctgctaaacaatcgagtatgccctcctcatcccacacaggctctgccatatatggtgatgctccgataaccgccacatacctgccgcttctatttgccactgcacatgtgagcaccggaaagtctgttgactggtttctctggcttaagtatactacgccctttgcatttttcggtactattactgacacaagcacatcgcgcgtggtccttggaagtgccgcaaactcgtccaaatccataattcccgccttgtgaagctgcacctttgctcccagtgccctgaaaatcgtcatgacatctgaaaatccgaatcttccccagatgcttcctccgacagttgccacatttctaaattgcactccgacgatatgtctgaccgactctgcgattgcaccgtgtgtatatgcattcagtgcttcatgagtctctatctgcctgagtgttgcatacgcaccgattctaaactcgttctcatcctcatcaatcctgtcaagcccgaggtcgcacaggtcaattgccgtgccaagcgtcttatttttcattttgagccagagcatgccgcccagcacaaaattcggttttttctgataaagctcataggcttcatcaaggctttgtgccctcacatactgattgtaataaaacatatttttctcctgttatataggtaactatcaattacctcatttcgatttcatacatcgcttcccacctgatgtcatgctccttcataaaggctatgaggcaatccctgtcagaaagctctgctctccatgccagcccgcagcccgccgatatgacagacggaagagggatcgtgcgtcccggaataccacatgccttgcccttgatatcaagctttaacggtgctgtggtagtctcgaaggtgatgattagccgttttttcttttctcttgccaaatttttatccattgcctcacaccttgtataactctacggacttacaataagagatgccccagccatcttttctgcgatatcatacatgttggtcacctctccgactgcaagtttatctgacagctcatagtaattcagacaggttccgcaggtaagaattttcaccccacggctcttaagctcctttaaatcctcaagtgactctgagccctcacaggtcagctttgctcctccattgtagaaaagcatggtttcaggcgggttgtcctgctgcgaaagcgcgtagatgaagccctttataagtaccttgccaagctcctcgctgccctctcccatatatgaagagcggattacaacaaccctgttatctgcggccggcctgcatgtatactgtgaagcctcgtctgtatccgaaagctcatcggcatttacagcctcaattgtcagctttacgctgtagcttccgtcatcgagcttactactatcgcagctatagcctttctgtacagccatcttttttaaattttccactgcaacttcattgtccacaagtgtctccaccgtatccggctgtgtgagagcctcgattgctttctttgtctttactaccgggattggacatgtatcccctattgcatttactgttatcatatttataatcctccctatgttattttaactcgtcagccctcagaatgcagggcatgcagcctgtcagcaaatttgcataagctatggcagcttaaaatcagtttacatatatcggcacatctcgccgcttaacaaatcgtcccacttttgcagccggaagtcctgcggctttaagctcatgcaaaaatgcatctgcctcagtagcttttactgcaaacagcagtcctccggaggtctgcggatcgaaaagtacctcctccattgagaaaggtatattttttgcaaagcacaccttatcacctacatggtttctgttgcgctgcgctgctgccgtgaggaaaaactcatctgcgcatcgcagtgctccggtaatgaccgggatggaaatcgagtcgataagtgctgttatatcatcatttaacatctcactcagatgtcctaaaaagctaaagcccgtgacatctgtgcatgcatgtatatcgaaagcatgactgatttcggatgctgccttattcagtgtggtcatagagcttaccgcatcctcaattgcacctaacggagcctcccctacgcggtttgcgttgcatacaagccccactccgagtttttttgtaagtataagcacatctgacggctgccctgtattgttgctgtaaatatgctccgggtggaccgtacccatgactgaaagaccgtattttacatcactgtctgctatagaatggccgcccgcaagtgtgccgcccgcctctatcaccttatcggctccaccttgcattattttgccgagtatattcaggtccattttctccgggaaacagacgatgttcaatgcggtctttactgtgccgcccatcgcatagatatcactgagcgcatttgcggccgctatctgtccaaacgtatatggatcatcaaccatcggcgggaaaaaatcaagcgtctggactaccgccgtgtcatctgaaattttgtacactgccgcatcatcacagctatcatatccgatgagcagattgctgtctttttcaccccttggcagctttgctaaaacatgacttaacaaatccggaccaagctttgcagtacagccaccgcccttgcaaaacactatttcctgtggcatttttgctcctttcaattgtttaatactatttatcgcaatgccgcaatctgcataagcgcttcagcggcctcatttatctcatcaactgtattataatatgaaaatgagaatctcaccataccctgattttgtgttccaaagaatttatgcatcagcggtgcgcagtgtataccgctccttgttgcaatgccatactcattcataagtatgtctgacacctccgccgagtccatatcagctatatttactgaaacaatcgcacagtgcagaccattgtcgggcagcatatcgaaatctccatatatcctgattcccgggattgtctttatttttcccataaatacctgcatcagctcatgttctttagcgtatatattgtcgaggccgattttctcaagctccatgacacctgttaaaagccctgcgattcccggaccgtttaaggtacctgcctcaagtcttgtcggaagctccataggctggttctcaagaaagcttagcacgccggtaccaccgctcttaaacggctttatatctgctctctctcccacataaagtcctccggtgccctgcggtcccatcaaccccttatggcctgtgaagcagagcacatcaatattcatgtcttttacatttatcggaagtacaccggctgtctgcgatgcatcgactataaataaaaggttatgctttcgtgcgatttgccctatcgacttaatatccaccacgttgcctgtgagatttgaagcatgtgtgcagacgatggcttttgtatccggacggattaaagcctctatgtccgacggggaaattatccccctttttatgcctacatcgctgcatggtacaatatccaaacccacgccccgctccctttgcatataaagaggcctgagcacagaattatgttcgagctgtgttgtaatcacatgctcccccggctcaaacaggccgtggattgcaatgtttagtgcctcagtggcatttgccgtaaaaacgagtctggccgcatcatctccgccgaaaaattctgtaagacacattctggcctcatatattttcctcgacgcatcaagcgatgcatccgatgccccgcgcccggaattaccgcagtgcttcattgcatcaagtactgcatcatataccgcatccggctttttaattgttgtggcagcattgtccaggtaaatcatagtatgtcctcatttacttctcatccaagcagataaaaattctttatataaagctcatcatttatatttttgctaagcatatttgcttctgtatgcctcggaaggcttgcgtaaattattgaatcgttatttaatttacacaatacttcccagcttttcagttcttcaatcattttataatctttaatcctgattatatttttatcagcatatgcaagtgccgtttttgttttgcctgcagatattataatatcctgtgggaaaacacctatgtgcgatatgccgtccatactcattgcagtctgttcaagctgctcatcagtgacctcaaatacgctatcccattccacagcaaacaaatgatgcttatcctgccattttacctctgatatattgttgcagcccacaagcagtgcctgctccacagacataggccgcatgaagaaatcttttttgtcgcggactgtactcagtacaccgctctccatgcttccgatacgctcggccaggcgatacacctcatcgcgattgtgtgacacaaaaacaacaggattgtgaaaatctgtcagcatctccataagctctgattccatgcttctttttacatgctcatccagtgccgaaaaaggctcatcgagcagtatgcactccggcttagccgcaagcatgcgaagcattgccacgcgctgcctctgaccaccggagagatgattgggatatgtgtatgccatgccctcaagcccatacctcttcagccagcccttcactttttcctcgttacgctgacccattgctatgcatatattttccatcacagtcattgtcggaaataatgcatagtcctgaaacagatagcctaccctgcgcttacccgggtgcagatttatacgctttttagaatcatacagcactcggccgtttaatgatataaagcctgagtccggtgtctctatccctgctatgcactttaatgtcatactctttcctgagcccgacataccgattacggacacaacctcgtccgtaagctccatgtcaaccgagagcatgaaattatccaactgtttttttatttttactatgagcgacattattttttctctttctctttatgcccttgcttttgccgcatatcatatttatcgatacaaggcatgcaaacgaaatcgctatgattactatgcaccagaagcccgctgtggcataatctccactttggacgaccattgctatctgctgtgatatggtcgaggtttttcctgctatatttccggcaagcatcgatgtggcaccatactcaccgatagctctggcaaaagccagtgtgacacccgaaatgatgccgggcttcgccatcggcagacgtatcttccagaaaatcttccactcacttatgccgagagtgcgcgccgcatatatgacattttcatctatctgctcaaatgccgccctcgcatttctgtacatgagagggagtgcaatgatggttgctgccaccacacagccaagccacgtgtgtactacctgtatccccatgctatggcttaaaaagcttccaaaaggacgccttgtgctgaaaatccttaaaagaatgtatccagccacggtaggcggcagtaccataggaagtgtcagcagtccatcccagaatgccctcactctgccctttgtgtttatgacaagctcagcaaaagctattcctataaaaaaagaaaaaactgacgctactattcctgtttttaatgttacccaaagcggtgaaaaatcaatctgtcccattattcctttaccgaaaaatgatatttctcaaatactgacattgcctcatctgtctgaaggtatgcgataaattcctttgctgcttcaagctcatctgatgtagtgctgtctccctttaaggctgctatcggatagatgacatcgcctgttaagctgtttggaagcttttctataatatcaagctggttctcgtatccgaatgtatctgagtaataaactgttcctatctcatttgcgccctcagctacggcagatgcaaccgcacctacattggcacagctgtttatttccagaccgtcaagtgcctttgagatatcagaatctgaaatgtcctgtggctttgaagcatcaccttcaaccatttttgaatttactaacgctgctctggtgtactgtcctacaggaacagttccgtcagcaagcgccatatttttagcctttgagatgtctgcaaagccggtaactgccgtgccactattcttatatgtaacaaggcacacctgattatttaataggtcaacacgagtaccgtccaccacgcttcctccgtcgtagccattctgaagctcatccatctgtgccactcctgctgagaaaaagatgttgcacttcgcaccctctttaatctgtgccatcagagttccggagctgtcatagttgttctggaagtttacatttggatgcgccctggtgtaggctgcacaaatttcatccatgacaccgtttaagctctttgccgcaaaaattgataaatcgacatctgcatctgctgtattcttttttccacagcctgcaaaaagtcctgctataaggataagtccaaacgcaagtcctgcatatgctgcaaattttctctttaagcccttgcgctcctttcttggtccgtcagtgcctgtcgctattcttaagctcatacttttaacctctctttttatttagacaatatgcatgtgattaatgtgcatattcagcttatcttgatttattaatatatgataatttcatcatccaatctgctccagcagcaccgaaatactgcctccgcacaccatgccctctttctcggcatcgtcagtgttcatgctcacatccatcaggccgcatttaaactcctgcttgcgaaacagtctcctgcaatggcttataacctctgcctccgcacaaccgccgcctatagttccgattatccgattgtctgagctcacgagcatctgtgttccgactccgcgcggtgcactgccattcttttttatgatggtacacagtatatacttctcatctgatgcctcaataagtgcatcaagcacttcgttatccacctgtgtgcagctggtacgctcatttttgcactttactatttcacttatcaccgaaagcgcaatttcctccggtgtctgtccacctattgcaaggcctatcggagaatgtaatccggctatgttttcctgtgaaaatcccgattcttcaaggtctttttttactatgacagctcttttctttgagcccatcatccccacataggcatatggctttctgaatatctctgtaagacactccatatcaaagcgatgacctcttgtcatgcatacatagtaatcatccgcctgtggctccagcctggcgagagtttttttataatcgccgcaaattacatggtctgctccttggcgctttgcattatcggcaaacagaggtctgtcctctatcacccatatgtcaaaggccaaaagcgatgccatgcgtacaagtgccgccgatacatgacctcctccgcagattatgaggcgtggtctgctgcctatctgctgtttaaacatcacaatggaattatcattgtcatttatttcatctgcccatgcactgcctgatgccactcttattctgccatctatataaagcgccttttcaccggcatgtgctccttctatgactgtcaacagctcacagcggctgtccgccggtctgtcctttatcgaagcatatatgtttgccggaatcagcttcacctcgtcaccggtatgaatctgaccgcctcttatgactactgcaaacacgccctcctttggcataatgcactcgcccatcctcttgtagatagcacaatgcgaatgacactgtttgcctatctgcgtcatctccagaatggcatctcctatgcaaaagcgtgttccaagcggtaaattcttgaaatcaaatcctgatataattaaattttcgccaaatgcgccgttgtctatctgcgctcctcttgccctgaaggcatctattttctctgcggaaagcaggctgacctgcctgtgccactttccggcatgtgcatctcccatgatgccatagtctgcaacaagctccgcctgtggcacctctctcttttcagttcctctctctttgcttatattgattgcaagaagctttcccatgatttgctatcagcctcctatccggctcatatttcttgctgcatttacttccgcagctttcagctctgtagcctttgtctccacagtctttgtctctgtagtttttgtatatgtcacagcattatcattaaaattgtgacaccctggctttgcctttatggcagcctttagtgcctgaactattacaaaatctttttccaaatcatctgtaaattcgcatgaatcaggtactaaatccatcgtcacgctgcttcccaggcatggcataagcctgccgtcagccgtaacacgtatgcggttgcaggtatcgcagaacttcccatagattgcctgaatcagccctactctgatatcaagtccatgaaaactgtaatactctgccggaccgttatccgcattattatatcccgaattaatttcttctctattttcagtatctatatggcaagaagttccatatacttctaaaagtgcgccaataaccttctcatacggcttgactccgttggtatgcccttcacctaccggcatcatctctataaaacggatatctgtgcctttttttgaagcataccgtgtgagagccaccacatctgtctgcggtgtgagcaccacattgattttcactcttattccacactctatggcggcatcgattccctgctccactttatgaagcagcggtttttttgtgatatgttcatattctgacgcatctatcgtgtccaggctcacatttatactgtctatgccggcttccttaagctgctttgcatgctgcgcaagcagtactgcgtttgtggtgagcgatacactcctgacaccgggtatctttttgatttgtgaaaccatctcatcaatctgcggatgcagaagcggctcaccgcctgtcagacgaaaatgcgtgattccaatccttgtggctgcgcggactatgcaaagcaccttttttacgctaagtgtatttattacctgacaatttttattattgtcctgtgggttgcaataataacagttcagattacagctatctatcaccgatatgcgcatgtagtcaatctctctgccaaatctatcgcgcatattaaaagcccttcccgaaaccgcagttaggaaacgtgcagacatcacaattcaggcagagtccgccttctccaagtccggcaagctcatctgccaaaatcatatcacacgccataagcctcggcaatacaatatcaaatatcgtgcgcttgttgtacatggcgcagccaggcagtccacatatcggcaccagcctgtcacctgcatcatagtacgacagcaaaaacatggctcccggtagcaccggtgaaccgtacgacacgatccgcgcgcctgtattttttatggcaagcggtgttttatcatcaggatccacgctcattcctcctgtgcagaatacgatctccgctcctgcctctattgcacgtaagcatccgtctgttatttttttgtcatcatcatcaaacacctcatgaaacatcatctgtgcaccaaactctgctatctttttctcgataacaggggtaaacgcatcctgtatcctgccgtggaacacttcatttccggttgtgattatcgctgcttttctgaccacgaacggctttatatcaagaatcggtccgtcatcgcatatgtgcgaagccgcctccagcttatccttttttatgacaagcggtatgattcttgttccggcgagcttatcaccctttttcacagtggtattaccgtgccttgtggctaccatcatttcaccaaaggagttgacctttttcagcttttcgctgtccaccttaagcagtccgtcacagtcagcaatcacctctatcttgccttcctttacaggggatggatgcattttacttgcggtgccaccaaaaacgccggattctgcggcttcacaatgacgttcgacgtcggtctcattgctatttgtgccacatgcgctcatacgataaagcacctctgctgcctcattttcgtgcatcatggtctcatcattttcccatatatatatggtgtcttttccgacgctaagcagcaccggtatatcctcttttgttataatatgccccttgcgaaaaaccgcatcctttttcacaccggggataatctgtgtgatatcgtggcagagcacctgtccgactgcctccgttgtcttcataagcttcatataatcccacactccaaatattatttttgtaaatagttactgtcctaaaccataccccgtgcatttctgtcaccggccgcactcactgtcatactgcagtaaaatatcaagcccatgctctatatttcccatcagaaaatccatgctctccgacactgccttcacactgccgggcagattgactatcagtgtgtttttcctgataactgaagctcctctgccaagcatggctttaggtgtaagactcatgctgtacgctctcagtgcctcagcgatacccggtgcattacgctctgcaacatccattgtagcttccggtgtgatatctctcggtgaaaaaccggtacctccggttgtaagcaccagattgcatttcacatcatcacacagcctgacaagctcgtctgcaatctgctccctctcatccggtatgattttatatgaaaccacatcatacttatctttgggaagcagttcctttattttcggaccgcttttatcctctctttggcccgttgcgcctttatcgcttatcgttataatccctacagtatacattacatcaccctgttatccttgattaattgtgtatttttaacttctcagcattttaaatgagctgtaatcgttgccggtcaaattgttaattgtgaacagcaacgtaatgcccgctcttgccaccggatttttccagcagatgtatctgcccgatctccatgccacggtccagtgccttacacatatcatatatggtaagaagcgccacactgacccctgtcatggcctccatctctacaccggttttgcccacacaggctgtcgtgcagattgccgtgatactgctgtttttttcatccagctcaaactcaacatcacacttcgtcatggcaatagcatgacagagcggaatgagcatggaattgttctttgcgcccatgattcccgcaatcctcgccactgccagcacatcaccctttttagctgtgcccgtagataccgccctgtatacggcgccatttacctttatcgtgccacaggctttcgccacgcggtatgtgtcatcctttgcatgcacatccaccatgtgagcttcccctgcctcattaaaatgtgtgagctttcctttattttgttcctgattattgatatctaattcgttttcctgcgtcaatctatttatcctcactgtaactattcagaaccactgaaaacacctaaatagttaccctcatttattatttaataaatctttacgccgtgctcaaatgccgataccgcctcaagcacactgcctgctatactccttgccttgtcagagattgtaaagcagtttgttagctcactctcgcgcgggtcgatatccgctatcttgaagcctttcctgaaataatacccctcacggataaggcctcgtatgatacctgtaattgtagcatttaccggaacatattcagacaatgcattgtcatagctttctttatccggatatatccgcgctatctcatcgcccttttgcacgatgtctccgatttttctgacgtcatgaatatatcctgccgccggagcgtgaatcacacgctcacttgtgaagccagcaatatttcccggaacacctgtgttgggctgtgccatgccatcggtaatgatgcgcgccagattgtgcccacgcatggactcgatcaccagatgcacgtcttgccctgccgtaaagcccgggcctactcctatcacaagcggtgccatattgattgtggtacccagatttttctttgctattatggcatctaccacaacatccggctttaaaagtgcaattgactcaccctttgggtctataagaagcgggacctctccggcttcaagcacagcttcgatggctgaactatcccacttttctgatacaatatgagctgccggtgtgtcatttatccctgaatatgtctctgtatccgtctctgcatcagccaaggcaggaacaagtctggctgtcacaccctctacagctgcgctcccatcatacactgcttcacaaaaggacacctggcgccgtatggcagccggatagtctgtctcaagcgctatcaccctatgccctgcccggtgcagtctgtggatgatgccggtcgcaaggtctcctgcaccgcggcatatgattaacaaatttttctttattatctgattattgctctgattcatgctcatctgattaattaccctgttaccttattatttccatatttgcaactattcagaaccacccacgctcattcgcaaaaacgcacgatactcgtccttcaaacccgctatcgcgcagctttctgacatagacctgccgcagcgtatctataaccgaatcatcaaccactgcatcctctgccgtaccaagctccttttgcataagctcatatcgaaatacaacgtccttacatgacctgcccttttcccatgtgccaagcactatgataacatctgtggtacccggatatatgaccggctcatccgctgccggatatttgagggaatggtgctttgccccatctgcttcgattataacataatctaacgcctgtggcatgtctttaatcagtttatcaagcaaatcatacggcagtccgcacatctttgactttgactgttctgatattttctgccccgccatacaatatccatcttttattattttatcccttaacgcaaaaaaatcgcaggataggtcagtgtcagcttcgacatacatgtgcgttgttgttgtgacaagcacaccttttccacccctgtgatattcccttgcaagcttatgaacgagtgtggtcttgccacctgcgcccactattgaaatcactttttccatatatttccatactttcccacaaacaataaagccgccggtgtacttaatgcaccggacggcttcaaaatcctaagcgttagtcatccacacgcttcacatcgtctttctcgtccatatcccacatatatggcgcgttctttgacttcttcggcaaaataatattgagaagaatagcgcaaagtgagcaaggcacgatacctgaaccgccaaatataagctgtacatagtatggcagatgtgatgtagcaccggttgtagcgccaagtccgtagcctaaaccgattgctactgagataattgtaatctcacggctgccgattggctcctttgtgatgagctcaattcccgaaatcaggatagaagcaaacatcataacagcagctccgccgagcactgactgaggcatgattgacatgagagctccaatctttgggcagaagccgcaaataacgaggaatatagctcccattgaaatagcaaatctattgacaacctttgtcattgaaacaagacctacattctgtgagaatgaggtatttggcagtactccgaaaagcgctgcaaatgatgaaccaagaccatcacagataacaccgcctgaaagctctgaatctgtagcctctctgtccattccgccctccacacaggctgagatatcgccaactgtctcgattgcagtaacgataaacatgataccgattgggatgattgcattggcatggaaggaaattcccacatctgacagctttccaaagcctataaagcttggaactgctatccatgccgcatttttaacctcatcaaagtttacaacccatgagtatgtgtatttaacaccgtcagcggtcacacctgtgtgtgacatggtaagtgtcataatgattgctactacatatcctgccaggataccaaaaaggatggcagatgatgaaaaaatactgcgcgatggtgcaaaatgcttaagaagcacgattactataagtacaaccattccaataaaaaggttaggcagtgagccgtaatcatttttgcctgttccaccacagaagtagttgattcccactccaaggagtgaaagtccgatcgctataacaactgagcctgtaacgattgccgggaaaaacttgcgcaaaggctttaagaaggctccgagtatgccctcgaagatacctcctacaaggcaggctcccataatagcaccatatgctataactccgccgccacacgctgcaactgtattatttaatactccaagaaagcccgaagaagttcccataacgataggtacctttcctccgacaggtccgatggaaaacatctgtactaatgttacaatacccgcgataatcattgcattctgtaagagagctgttctaagctccgcaaagccagcgtccgctgtgagtccgcacgctcccataacaatgataagaggtgtaaggtttccgatgaacatagccataacatgctgcagtccaagcggaatagcctgagacagaggtattctgccctcaaactggtaaggtgaagagttcgttgtctttttcattggttcctccaaataattatactcttatttaataaaaaatttacaaaattattttacgagcataaggctatgtggtcaatttagtattacttataatataatatctatttacttataaataaatgctgttgaaattagtttctgacaacaacagggcacaccacaaccggtatgccctatctattacaaacgatatagctattcagaataatctaaatttattcaaccctaagcagctcgcagtttccctgcatatccttccagaaatcctttataggtgtgccgcgaaactgattgactatgctgcagttcattgcaccgtgtcccacgacaagcacatttttgcctgcctcaagctgcggtctcagcacctgctctataaactcgcctgttctatgatatagctcctcaaagctctctgcgccgtcctttgccacatatttttccggctcctcaaagagcaggtagacagggcattcgggcttttgcctgatgttcttcactccctcataatcaccgaagcacatctcgtgaagcctgttgtcagtgataatctctactgcagggtttctgtctgcaagaaaaatccttgccgtctcctgtgctctcttaagcggggagcagtagcatatgtcaaagtctatatccttatatttttctgcggcatcgtaagccatctgcctgccggtttcgttgagtgggatatccacctcaccctgcagtctgtgctcctcattccaatctgttcttccatgtcgcaaaatataaaacataattaatcctcgatttctccatttctatgtctctcgaagaaatgccttgtctccttaacaacaacaccactgagagcaaacagcgctatcatatttggcagagccatgagaccgttgaagatatcagcgatagtccacaccgcacttacagtcatataaggtccgatgaaaactgcaagtatatatatccagcgataaacctttacatatttcatccttccgccactcaaatactctaagcaccgttcactataataatcccaaccgagtatagttgtaaaggcaaaaaatacaagacacagcataagtacaaatgctgataactctttcggtaaaggaagaccattctggaatgcgtatgtagtaacctgcacgccctcgagtccgtcaacctgccatgcgcctgtgagcacgatggaaagtcctgtaagtgtacatataactattgtatcaatgaaggttcctgtcatgctgacaagtccctgacgtacaggctcctttgtctgggctgctgccgctgcaatcggggcactaccaagtcctgcctcgtttgaaaagattcctctggcaacacccttttgcattgcaacaagaaagcttcccacggcaccgcctgttatggccttcggtgaaaacgctgcctttactattgtagcaaacgctgccggaaccgctgtgatattgcataccacaagcacgagcacaaatacaatatatataacagccatgaaaggaactattatctggctgacacttgcaatacgctttactccgccgataagcactgctgccacgcagaatgccagtacaagcgaagcaatgacaactgaccatgaatactccccaaggaacggtaaaacctttactgtatgctggtttttagggtcaaaaaagttgtttacagcacttgatattccgtttacctggctgaatgttcctattccgaatagtccaacgcatacgccgaaaaatgcaaatatctttgcaagccatttccattttgcacccattccctgttctatgtagtagaatggtccgccgagactatgtccgtccttgccgatgacacgatattttacagccaaaagtccctctgaatactttgttgccatgccaaagaaggctgcaagcaccatccagaaaagtgctcccggtcctcctgcaccgactgcagttgctacaccgactatgttgccggttccgattgttgcgctaagcgcggtacagagtgcgccaaagctcgtaatctcgccatcgccgccctcttcatttttgaccatccactttagtgccagaggaagctttctcatctgaagaagccccagacgaactgtgagcattatacctcctgccatgatgagcaccatgagcggcactccccagacgaaattgtccactgcactaagaaaattgttgattgtgttccacattgaaatactcctgcctctcttttttatctaaacacaaggtctttgtgttttgagcaaatactattaatatatataatttcatccggaaacaattgaaaaagcaggcctagcagcacttatgtgaattgaaataaaaaaccccatatacgctgcatatacagtctgatacatgggattaagaagattatcttaagaatatctgtccaatatcttctccgtcctgttgcctgagagattcgtacgagaagcagcctgtgccatgatatattcatagtcactgcactcctactgcttcctattcgtacgttgcaccttcggcccccgccaagcgggtgtctccagagagtcgatccatttacagttgcaccgcctgctgcggcacctgagagttttactccttcggtaggctttgataaggtaaaatcgctgccgttttcctgcaaacttcatctcgaaattgtttattttaaatttattgtttttattaaccgttaagaattatatgacatatatacgatttaatcaatagtataaatgtactaaactgtctcaaccttaatcacattggtgttgcctgtcttaccattgatgagacctcctgtgagcactatatgatcaccctttttgagcttcatgacactctttgcctcgttcatcgcattgtagaacataacctccattgagttgtattcctcgcacagaaccggctttacaccccagctcaggttcagcttgcgccatgccttttcagaggttgtcatgcctattatatcaacagggcaacggaaacggctgaccatgcgcactgtacgtcctgtcagcgagctgactacgatacatttcgcatccacatctattgccatggcacatgtagcatgtgaaatggcatcgactatgctttttgtctggaaatccgcattggcaaatctcttgccgtagtttatctgcttttctgtatactctgctgtctctgccatattttttacagcctctacaggatatttacctgctgcagactctcccgaaagcatgatagctgatgagccgtcgtataccgcattggctacatccgaaagctcagctcttgtaggacgtggattgtgaatcatggactcaagcatctctgttgctgtgattacgcgtgtaccaagcatacggcacttgttgataagatacttctgtattgccggtacctcaactcccggaatctcaacaccgagatctcctctggctatcatgattccatttgctatctcacagatttcctccacatggtctacacctgatcggttctcaatctttgcgatgatttcgatgtcctctccaccgttttcatccaaaaagcttctcagatcagctacatcctgctttgtagaaacaaatgatgcggcaacataatccacctcgttttttataccaaaaagcagatcatccttgtcctgcttgcttaaatatgcatgcttcatgaccttgttcgggaagttcatactctttctgtctgaaagtgtaccgcctgcgataacatcacagattgcatcgtttcctttaagctctctgacctgcagaatgatgattccgttcgcaacaagcacacggtcaccaacctttaaatccttaatcagattctcatagtttactgatactctctcctgatttcctacaatatcgtcagttgtaagtgtgaatgtatctccatccttgagctctattttgccattctcaaaggtcttgatacgatactcaggcccctttgtgtcaagcatgattgcgattggcatatgaagcttctgtcttaccttcttgattaaatctattttgccctgatgctcctcatgtgagccatgagaaaagtttaatctggcaacatccatacctgcctttatcatcctggtgaggacatcctcatgttcgctggccggtccaatagtacagataatttttgttttacgcattgatattcctcctgatgctgatcaccctatcagcttttcttttaaaatataatctcacccgaagtcattatatgacaattttcttcaacaataaagtaaaaatatatttttttcaattatttaaaaattcatatgctccacatacatttcatcgaaatgcggatacgatgccagctcgatgtaacgcatgtctccgcttatatccagcgctctttcccaggcttcctgcgataaagctgccgaaacagctccgtttcctgccgcatttcccacttcttttgccctgtccaaaagctcctgtggaaacaatcctattgccgccgcacttgctttgtcaatgtagtttccaaagcctcccgcaaatgtaagtatatccaaatcacagggcttacagccatattccttaaacaatacttctattccggcggctatcgcgcccttcgcaagctgcagcttcctgatatcctcctgcgtaatgtagactcccggtgcaatatgaacggcgagagagggctctgtgctctgtgcagtctcctccgcttccacctcaaacacatacgacctaaacagtataggaagctcctgtccgcttaaaatcgtgccgttttcatctatgattccggctttcagaagaacggcaagcgcatcgataagccccgaaccgcacaatcccacaggtctgtcatttccgataaccgaatacttaattctgcgcccttccagccataccttatccacggctcccttagacgccggcatacccagctcaatctgcgccccctcaaaagccggtcctgccgcggtggcacagcacacatatctgtcgccttttccaagcgccatctcaccgtttgttccgatgtctagatagagtgtcagctcgttgcagttcactgtctccatcataccagctgtaatatctccgcctacaaagcctgatacagccggaaatataatcatggtttgacaattctcaagtcctatatccaaaggattaaatttcctgccaaaatattcatccggcataaacggtgcctttcccattttttccggtgaaattcccataagcagatgacacataaccgtgtttccggcaactgaaaaccggctgactttagttctaccacattccgtgagcatttctgatatccagccgttaagcagggacactatctgtgtctgcatcatctgcaggccgccattcgctttatcgttatcatccgccctcgctgcagcatcaattctggaaagtacatctgctccaaagctgcgctgtggattggcaccgcttctggttgagataatctgccctgtctctttatcaatcagataacagactactgttgttgttccgatatcacaggccgccagagtgtcttcaacattcctattcacatgctcattaaatttttccgatacatttcctccatttgtcagaacaaccatgctgtcttctttggttccggtgctttcttttcttccaacaataatttccataccgtcacaaatcttcgtctgacaggccagcacgtccttatagtatggttttgccaccgtcaccttgcacttgccgcaggttccttttccaccgcacggtgtttctatccctgcaatgccgtgactgcggcagtattcaagaatagtggttttgtcggttgttttgctatctgtgttaagatttatggtaattcgctgctgcatatagtttacctcatttgacattgtactattatggcttttttctttgtttgtatgatagcatatttatatatactttaatacaaaaacccggacaaacgtccgggtcttcgttaatccataattctatctggtaagtgctgcaacaagctcatccatctgcttttcagatgcctcattgagagtagatttaattgtaacaaccggctcaacacactcaatattcttgaagccctcaacaatagccttcatctggcgtgctgctgtaggtgcccatgaaccgttttccacgaatgcaatcttacgattctgataagcctttgccttgagatgatgtaagaaatcctccattggtgggaaaatgcctccatcatatgtgcatgcgcagagcacaagcctgtcgtatctgaacgcatcctcaacagcctctgccatatcatccctgcaaaggtctgtaaatgcaacctttacacctgtagccttgagcttttctgctaaaagctctgctgccttctttgtattaccgtgaatagaagcacatgccacaaggattccctcatcctcaggctgatagctgctccatgtattgtatttatctatgtagaagccaaggttctctgtgagaatcggtccgtgaagaggacaaatcttttcaatgtcaagccctgctgcctttttaagaactgcctgcacctgagcaccatactttccaacaatattgaagtaatagcgtcttgcctcacatgtccagtcctcatcagtatcgagcgcaccaaacttaccaaagccgtctgctgagaaaagcaccttgtctgttgactcgtactccatcataacctctggccagtgaaccataggagccatgacgaatgtaagctcatgctttccaagagaaagcttatctccctctgccactacaacctttctgtccgttaagtctatatcgaaaaactgtcccatcatgttaaaggtctttgcattacctacaatctgcatatcaggatatgcctctgcaaccttctggatattggaagcatgatccggctccaaatgggaaacaacgagataatccggctttctatcaccgagcgcctctctcaaattggcaaaccacttatccgtaactcttgcatctgctgtatccatgattgcaattttgtcatccataatcacatatgagttgtatgaaacaccgtttggaacaacatactggctctcaaataaatcaatgtccttgtcgtccacaccgatgtaaataatgctgtctgtaatcttcttgtccatgataggtacctcctgctaataacctctgcttaaattagtaattattactattttttttgattaaattatatgacaaaagtattatccggtcaacctgataaattgtatttttttgtatttttttgtgtaaaaatcaatccaagctatctatattgcataccttgttgtattccttcctgtatgccaagctttttatgatcatcccatgccttacacatatttaccacatcttcctttttatcatacttaatatcagttcttgtctcattataacctatcacctgcaataattgcccataaagcagtatcaatatactcaccatttttatagtatttttgtctggccacgccttctaacaccatgccgcatttctttaataccgcagaggaagcatcatttccatagaatacttctgcctgaactctgttaaatccaactctatcaaaggcataatctaagacagcctccaatacttctgtcataatgcctttattccaaaatccgggagacagcatatagcatgtatcacacatatgacatgcttcttccacatttcccaaattaattgttcctatcaattctcccgtttctttccactcaattacccaatgaaaatatgaaccagactcataattagatatccaatgctttaccttgtccctatatatttctatatcatcaacaggattaaatggatagtatctgctaacttcatcatacttagcccaattttcatacatcatagtataatcggatagtttgattcttcgtaaaaaacatcgttttgtttcaaaattctgtgtgcctatataattcataaattattccttttcatattcaaaataaattcctgcaaatatctattaatcacctacatggtaaaatatacagatacaagatacatctactccccctgtaatataaaaatcatgccccaacacaaatcagttggggcaatttctatacttttaagctattatactacaccatctcaggaagtttgtagcctgctttttgcattgcgtctgcgaagtcatctaatgacatacttactctacttgcccctacctcagggtctaatataccatcctgaacaagtgaatatacttcaagacatcttccttgtttcattccctcctgaatgccacgctttttatgatcgtcccatgccttacacatatttaccacctcttccttttcatcatacttaatgtcagttcctgcaaatagattgatagctgctactgtctcaacgtcaacccttgtaaaggtttcgtcttttgtaattaaatcattcagctttccctcatctgacgcatttttcaacacttcaaacagtggtctcagtcctgttttgaacttggaaaaatccgtaatctccagtggattcaacagattaatcctgtaatcgttgataaatggccgaaatctctcgtccatatgaggcatcatctcaacaagacttcttggaccatcccagttttttgttccaagatataatgtaattgtaatcaccggtgtcagcctatcctcatgtgtaaaccctgataaaaactcatctgatgatttataatctttgtttttctgatgttgcttcttcgcctcgttgacctgttctccataattcatggcatcataaatcatggtcttaaccggcatcgaataatgaacatctgtctgtgcctctatccccatcagtacgatgtatactgattctgtatattttacagacaccccctttagcaaatctctccatttctgcttaacaatctgcttcctatcaataccgaaaactgataacacctctgtggtgtcacattcctttaaattctccggtttgataaccttctcaccgtcaaacaatacataattgcagatttcactgaacctcgtattgtctgacaaatactccttcgccttcgagtcctttgtacccaaattaacctcctcttcttgtgtgagcaggaaaattcgaaatcgaattaaaatactgtatgctaatataaaagccggcaaaatccccacaccccgcttttctcgcaatgttttcacatctgacatttcaattttcctgctattaactggtaacataaagcattgaaaatttccatgtctttgtcgaaaaatgcgaagtggtctgccctcttcaaagtgatacacaccggaaaaatatgctgtggtgtcgtatttacagaaatataatgctttgagttgattgtagcacacagaagtaagcttgtcattatatttttcatctgtgataatacttgcaagataacatgtcatgcccgacatccagaatgttaaaaagaagcttccatggcaaaaaccgcaataatctccagcttcgttacacaagaagaatgcaaaactattttcatctgccctgcattagtcactataatggtttgactgactcaacgtattcgtttagcttcgctcttatctcttcaaactgctttcctgtaacctcattatccgactcaaatgccatcattttgtcaagatatccacgctcctttgctatctgaaggctgataggataaaccagctcaaatgtcagtgcaatgtgccctgccacatggtctaccgcggtctttttacaggaacgaagtaccgcgtgtctctcatcaaaggctgccataacctcagaacttacctgcgaatttttcagttcctccgtcgtcacattatatatatcctctgccggagtatctacatttaccctgaaaatatccaccttatcagcatcccttagtatattgcaaaacataaccgtataatcatcgagcctctcatctattctgaaagcactgtgatttcttatcgcattttcaacaattgtgccgtatttatcatcatgaaatccatccacatatgtgtcgataagtccttccttaaacagcaggtctgctccaaaattggcatgatcaacagactgtgcatcgttaaatgtgttataacgcttaatctgttcaaatcttccgacatcatgcagcatccctgtgagccatgccacatctgtctcatattcatcaagctttaaatcccttgctatcagctcgcaaagctccgctaccctatatgtatggtctattttaagcttaatctttgggtctgtggcattatatcctgatgtgtactctgcgaatgtgttttttactcgttctctatctattatcatgtttattatcctttcaaaaaaccggtttatctgtggcttcattgctgctgttttaactcccatcgcaccacatctctatgtggattaaccctggcaagtccaatctccgtaattgccgcttcaaaagacacaaagctttcctgcattactgaaaatgccatctgcatctgttcctttgtcagtttctttccaagtgtaatatgcggcagccagctcattggcttgtaatatctgctcactgcacattccggaatgcttttcatctcatcaaatactttttccgataaatcctgcaaatatccgttaagcaccggtgtggcataaaatacatatggcagcaattgccccactgacacaatgctaatcgtcccattagaaagtgaatttcgcagattatccattgctcccaataaagcattttcacttcgggcttctattgccgatatcgtcatgtgtggcggtacattgttatccaccatgaatgaattacctgttttctcagctattttatttatatatcgttgtaaaatatgaactgccgtcttatcaaaatatacagatacaagatacatctactttcccctgtcatataaaaatcatgccccaacacacataggtcggggcaattactgttcctatttatcctttcctctcctcatcgctacagctcccggcgatgatattgcacttcccaatacaagcttcatcagccagataaaaaatactatcacaagtacaggaataagacacgttgtaactataagcactgccagtccatcaatgaacttgttgaccatgttctttacactatttgccgtaactgacaatgtatttttcacactgtttactgcatccttcgccttatctataaagctgctttcagaacccttactcttcttgctatccttatcatcatcctttgatgcttctgattcatccgctaaatcatttgcttcatcaatcgtcgcatcaattgactcctggtatgtactgtaaatcatttttgagacatgcacacttaccggaataaccgcatatattgccagtccaaaaatgaatattttgacacctattttccaaaagagctcctttttgcttccaaaatatactgccaacgcgagcattgataccggaataagccatttgaaggtcaacgcgcccaaaatagtcagcagatatttttcaagatatattgctgatacaacaatcaaaaaatatcctgccagatccattaatttatttgcgacaggagttccgtcgtctcccggtgctaatgtaataagtgttgaaactgctgtagcacttgcgctcagctccaatgcagttgttttcttttcatcgagatactttatagtttctttgtttatttttgactcaggcgatgaatagctttttgcaagtccaaaaaatgaaatacatgcaataattatacacactataattgcggctactctgaatagcaggcttctttcaaaagatgaatcaattttattttccataatgacttataccctcatattctataagaatgttctttttccctcttcccggctattcttcaaggtagatgcagctccctctccggcaaaatattccttcaccagctttacaactacacccgaaagcaaaaataccgcgataaggtttggtatgaccataaggccattgaaggtctccgctatgctccacatcaatccgaggttcattgtcgcaccgactatcgcaacgagcgaatatactaccatgaacggcttatttgccttagttccgaataaaaactctatgcatctggttccgtaaagtccccagcctatgatggttgaaaatgcaaaacagcacatggcaaccgctgtaaagattgatacccagccgccgtaggtggatgtaaatccgctgatggtaagctctgcgcctgctgcttctccatagcccacagaaactccgctgcaaagtatgacaagcgctgtgagtgtacatatcacgatagtgtccacaaacacctcaaatatgccaaagaagccctgctttacaggctttttggtgtctgcacaggcatgtgcgatagagcctgttccaagacctgcttcgtttgaaaaaattcctctggaaactccctttttcatgctcataaaaaagcttcctactgctccgcctgtcactgctgacggattgaacgcgccctctattatggctccgaatacgcccggtatagctttaaagttgacgattactactccaagtgccagcagaatatacatcactgccataaatggcacaagcttttcagtaacctggcctatacgcttgattcctccaagcagaataagcgcaatgagagcggcaagcactattcctattatgagattgaacgttgatgccgactcttttgaaattatatcgtaattatataaagctgaatcaatcgctgtggttatggtgtttacctgtgtagcgtttcctgtaccgaacacggtgagcacgccaaacgctgagaacagatatgccagccagtgccagtgctttttaagaccgtttttaatatagtacatagggccgcctaccaggtcgccgtttgcatttctctcgtgaaaatgtacagcaagtgtgacctccgagaactttgtgcacatgcccagaagtgctgaaatccacatccagaacaccgctcccggtccgcctatcgcgatggctcccgcaactcctgccacatttcctgtaccgacagtcgccgcaagtgccgtacacactgcctgaaacggtgtgagcgctccgtcggatgcctcacgttttttgagcatcctgccaagcgtaaccttcatcgcatatggaaactttctaatctgaataaatcccgttctgaagctcaaaagcagcccgacacctatgatacatatcatcgcaggcacgccccagataaaattgttgaccacgtcattgactttttctattactgataacatctttttctcctacctgaatttagtgtaatgtataaagtataacacggtttgtacaattttttatatatttaatttcatttttttgaagtttttctttataaaaaacacccggatatagcaatttatctatatccgggtgtttatttttgtataatatgattaaagggtcaaaaggtatcatcgatgcatgcttgcatgcaattcgatgtataccttagttacccgcactacaccgagaaagtagcaatttgctgcggaaacgcagaaaattagcggatttcgaggtgaagtcagattacgggaatgcgtagcatgtagtaatctgattaatcataaataaggggcaaaataccttttgaccctcatatcataatatatacaggatatccctctacagtccctgtgtcatcttgtaatctataagtgtcatgagtgattctgactcgatggcgagctgctcacactcctcaatccacttgtcataggcttcactcgcctcatcctccggctcctttgcttcgagcgcctccatcatggcattgacctcggcaaattctgccttaatatcctctaagagagagccttttgttgatttcatagtatcctcccaatttgatttaacgtaaaatatatttttatgttctcatgatagctcgaatagagccaccgcctcacgatttcacaaaaatttcattctacaaagtgtggctcaagcatctcaagctccgccacatctatgcagtttggaatcgtgccttctatcacgtcctgcttacactctgcgtagtcaaaccactttacagagtcgatttcctccttctgcactgtgatgtccgcttcgtccacatcgagccacagaagaaacaccttgcttatctggttgtccaggaatctctctccgtgaaacacctcgtctgcatggtgtctgtgcagtccacagtcgataagctgtttgggctctattgtcagccccagctcttccctaagctctctgagcgcagacggtatatagtccacaccggccggtatgtgtcccgcgcttgatatgtcataacagcccggaaatgagtctttttccatgcaccttttctgcaaaagtatctgtatggaatttccacggcgtctgactatccagacatgcgcagtcctatgaagtatattgtttctgtgcgcctgcttgcgctctacggtctgtcctgttggatttccctgctcgtccactatatcaaaatattccatatgagactcctttccctgctcaataaagtgcattttttgagatatattatagcttatttctgatagaagtacctatcccggaaatcaaggatttccgggatggttcggcggtcgccgaacttcgatttagccaaatatgaaattatgcaagcacaatttcatattcgccttaaatcttgtacttctcgtcgcttacgtcctattcgataggtgctcctgccggcattggtttctccggtgtcaggagtgcgagattgccctctgcatcctctgcgcacagcagcattccctctgataaaacacctgcgagcttagccggttttaagtttacgagaaccattaccttcttgcctaccatctcctcaggagaatagtactttctgatgcctgatactatctgctttgtctggtttccaatctttacctgtgagcagagaagcttctttgactttgcaactgcctcacattttacgatttcaccaacctggaactgaagcttttcgaaatcatcaaatgtgatttcttcctttgcttccacatccataggctcaagatctgcaccatctgcggcattttcacctgcaccacagccacatgctgccttaccctcaactgcagcaagcttagcctgctcagcctcaaactctgctttctgtaccgcctggattttctctacctcaggcatcacatcctctgcctttaatctgccgaagagaatctcaggtttgtctgtaacctttgtgccgctctcataaagaccgaattggtcaaggtcatcgaaatcacggagtgttgtgttaagctgtgccacaatcttttctgctgtctccggcaggaatgaatgaagcaggcttgctccgattgtgatagactctgtgaggttgtacagcacctcagcaagacgatcctgctgtgcctcgtcctttgcaagcacccaaggtgttgtctcgtcgatgtatttgttgcagcggcggaaaagtgcgaatacctctgtgatggcatctgccacacgaagtccttccattttctttgccactttatctcttgtgccggtaacaacagccttaagatctgcgtcaatggcagtctgatctgcatcgcctgttgcgcctgtgctctttacgataccgtcaaaatatttattgctcatggaaactgttctgtttacaaggtttccaagtatgtttgcaaggtctgagttgaatctctcgattacaagatcccatgtgataattccgtcgttctcgaatggcatctcatgaagcacaaagtaacgtgtggcatctacgccgaaaagtctgaccatatcgtctgcgtagataacgtttccttttgacttactcatcttgtcaccgccctgaagcagccatggatgtccgaatacctgctttggaagcggaaggtcaagtgccataaggaaaataggccagtaaatagtgtggaaacgcacgatatcttttccgataaggtgcagatctgcaggccagtttttcttgaaaagctctgatgatccgtcaggatcgtaaccgatttttgtgatatagtttgtgagggcatcaagccatacatacactacatgctttggatcgaaatctaccggaattccccagctgaatgatgtcctcgatacgcaaagatcctgaagtcccggaagcaggaagttgttcatcatctcgtttttccttgaaaccggctggatgaaatcagggtgtgtgttgatgtagtcgatgagtctgtctgcatatttgctcatcttgaagaagtatgcctcctccttcgcaggctgtacctcacgtccgcagtccgggcattttccatccacgagctgtgactctgtccagaaggactcacatggtgtacagtaaagtccctcgtatgagcctttgtagatatcgccctgatcgtaaagcttcttgaaaattttctttacacatttctcatggtcctcatctgttgtgcggacaaaattgtcatatgatgaatttaccagatcccagattctctttacctcacctgaaatctgatctacatactcattcggtgaaattccggctgcctcagccttttcctggattttctgtccgtgctcatctgttcctgtctggaaatatacgtcgtatccctctgctctcttgtatctggcgattgcgtctgcaaggatgatctcatatgtgtttccgatatgaggcttgcctgatgtgtacgcaatggctgttgtcatgtaatatttacctttgtttgccaatttagtttcctcctgattttaaaatgcgtataaatacataactccaccctcaaattcgccttttcaaggcttctccgctgcttcgcagctacaattttcggtctccgttatgccgtctgatttcgcataaagcacttctgcaaacaagtttgcgcgttctttatgctcatcatacttcttttatacgctaaaaaacgcctcctcaggagaaaactcccaagaagacgattatatcgtggtaccacttctcttcacgcagctatcaaaatcatccggcatcttttgccggcactgctgcgcctctttccgctataacaggcggttcctgtcaatatctagccaatggttcgatactgctgctccaaagccatgttcctcctactttaggtcatcccctctcagcctgtgtgggatttctctgtaaatctgccataaaagtactctctttttcgtcgcttttatctcatacatttctagagtagcatgtggcttttaaattgtcaactgttgtaagtcaactagaataagtttatctgtatttttgattcctcaataacattaatgtttatatcatttgattataatacaaagtgcacagactttaaccatctgtgcacctgtttttatctattttaccctatcgtataataatatacgctgtatatgccgcatacattagcagcatgacgataccctcgcctctttttatctcacgctttgtccatgccataatccacacgatgagtgaaaataccacaagcactataatatctatgatattttcctgtatgaatgctatcgggctgatggctgatgcaattccaagcaccattagtatgttgaaaatacatgagccgacggcatttccgagcgccatatcgacctcattttttctggctgcgactattgatgtcacaagctccggaagcgatgttccgatagatacgatggtcagtccgacgagtgtctggctcattccaaggtcaatcgctatgcggcttgcactgtctactacgacatctccacctactgcgatgccgacagctccgattagaatgaaaatcactgcttttggcattgagatgagaggtatctcatcgacctcctcatctgatgactgcctgttctgctttaatgtgtgtctgataaggtagaaaatatatcctgcaaagcagccgagcagtattattccgtccactctgccgagtgtcatgccgattgttcccatgacaagaagtaaaatggcacatatcatcgagaacgggaagtccctttttaaggatgctccgtccaccacgaccggtgtcatcaaagcgcacacaccgattactaccatgaggttaaatatgtttgagcctgtcacgttgctgactgcaagcgtattattgtgtgctatggatgctgccacactgaccgctgtttcaggaagtgaggttcccatcgcaacaattgtcagtccaatgataagtgacggcaccttgaagcgctttgccacgcttgagctgccctccacgaacaagtctgcgccctttaccagaaacacaaagcccactatcaggcagagcagcaccactataaacggtgcattattgatgaaattttccatgttgattcctccatttttttatttttgtattctatattatttcatttcttatagtatctgaaatgtattcccagccacagtttatgtcatatcataacacgctcattaaaagcttataattcccaggtgctcaagcaatatcttcacacctatgagtatgagaatgattcctccggctatctctgatttctttttatatttattgccgaaaaagtttccgactatgactccgatgattgagagcacaaaggttgtaagtccgatgattgcaatagcccagtagatgtttaagctgtcataggtaaatgcaaacataattccgactgcaagcgcatcgatgcttgtcgcaattgcaagcagaagcatctctccctgattgagcgccaggtctttttccacgaccgcgtcatcatccttttcctttactgcctcataaaccatctttccaccgataaatcctaacaggatgaatgctatccagtggtcaatgcttgtgatgtacttctcaaagcggatgcccagcatatatccgataaacggcatgagcgcctgaaatcctccgaaatacagaccgattgtcagcgcctgctttctgtttacatttgtcattccaagtcccttgcagatggatactgcgaaggcgtccattgacaaacctactcctatgagcaggatttcaataaataataccatatttttctcccttttgcctaatgtgctgcgattaaattttcgtttgtaccgggctgtctctgattttgtaattaattctgcaatatgcatatgaaaaaatgagaccctcgcatgcaggcacgaaaccttataaagctataatttatggcttatatagctttattgtgtgctgcatacttgagtctcattctttaatgtttgccaggtctattgaccggtctgttgacaaaccacgtatatgtaatgatacgcgaactactccctcagaggtagtgtgtatttaattaatcgcctttgcttctaaaaaatatatcaaatgacatgggctgtgtcaatgtattttaccgctaatctttgtacggaatggctaactttttaaaatcatggttgacacgaaaaacaacatgtgatatgtttactacgacagacatagtatgacactcgtagtatgttactcgtagtattgaataattttaagatgaaattaaacactttatacaggaggtgaataatgctcaatataagcagcgatgtcatccgcggatacaacgataccatcatactctacctgctcctagacagaccatcctatggctacgagatttcaaagcagataaggctaatatccgaggaaaaatacgtcataaaagaaacaactctctactctgcatttacccgccttgagaaaaacggctatatcacatcattctcttcgagcgacaatgcaagcggcaaaaggcggacctactatcagattaccgatgccggcagagaatattacaggatgaaatgcgaggaatggaagctgacacttgatgtagtaagcaaatttatacgattttaaaggagacattttatggaaactataaagaattatctggaaaatatgttttcgcacctcccgaatacccccgaggtgcaaaaagccaaatatgagctctatcagatgatggaggataaatacaacgaattaatatccgagggcaaatctgacaatgaagccataggcatagtcatatcagagtttggaaatcttgacgagctcgccgactcactcggcatcaaaagcttcgtggatcccagtcaggcaatgcctgctgccaaaacactctcccgcgagactgctgccgcattcctcagggattcggcaaaacaagcatatctcacagcgtttggagtgctgctttgcatcctcgcaagccttggaccgatattcagcgaatgcattccgcgttcactcgcttcacctgacgcatctgatgcaatcggcattaccttcctgttcctgtgtgtcgctgtggcagtcggcttctttatcttctcaggttctctctcatctaaatggagctacctgaaaaaagagccttactgcatagactttgaaacagcaaactgggtcatcgagcgaaaggaaagctaccgctccacacatgcgatgcttttaacagtgggtatcatgctctgcatactctgcgcagtgccggcaatcataatcagctcactgaacaccaaaagcaccttcgcagactcactttcaggcggactcgtgctcgtgtttatagcaatcggtgtattcatgatagtattcacaaacatgaagaaatctagctttgacaagcttctttccctgaacggagcccagactatgggcggtaattttgccaattcacacgatggcaaggtgcactatgaaaaccctgttgtggctgcaatcatgtcagtttactggtcaacagtcacatgcatctatctatgctggagctttattacctttgactggggtatcacatggattatctggccaatagccgcaatcatcaattcgctggtggaaaatctgctcggcgataaacatggaaattaatgaaaaccaagacagtcaaaaatgtgtgtagcatattttgaataatcacaaaacaaattatgcaacaagataattcagaaatggagacaagtcatgaaaaagaatatatatctaataataattacaataattaccgtggtctgcatcatcgccgggagtctctaccatatcggaggctttgccctagacctgtttgacaatctgattccgcgctcagacaagtctctcggaaacgtatgcacagaggagctttccgtcgatgaattttcaaacctggtatttgatacaaccatatcgaacatcaacgtaaaaaccggtgacagctacatggtctcatacaaatgcaacaagcgactggttccaaagattaagagctccggcgataccctcacaatatcacaaagcaaaggaaccaactacagaagaagcaccacgagtgaaatcactgttaccattcctgagggcgcagcattgaacaagctctcctttgataccggcgtaggcgaggtaaaccttaattccctgaccgcagctgatgctgaatttgacaccggcataggcgatttatatgtcacagactgcagcttcaccacatgtgatgtggatggcggaaccggcaaccttagctttgaaaactgtgcctttgacgagatggatatcgacggcggtacaggtaacatcactgtgacatcctcacagtcacttgacggttacatgatggacctggactcaggtacaggcgatatcacaatcaacggcaatgactatgatgatgagtatgaggtaaatgagcatgccaaaaagcacctggttatcgactcagggcttggggatattgaggtgaggtattaaattaaatttttcactttttattgtccataaactgcggctccatatatccggttcctgacatggacttgtagtagcggcttgcggcctgcgtgccgacacgcacctcgcgggcctgcttctttatggacgcaaatttcagagtcatgagatccttgttgcgggcctcctgactctgtatttttacgctcttgttgatatcatccactctttttaagtataaagagattttgaaaaatcccggcccacatcaggatacttagctttatcctatgacgtgagccgggatggcttgtctctttatgctctttgcaatttaatttaattttaatgctccagatttgcaaacttcgtgtactcaggaagccatgcaaggtttacggtgccgattggaccgttacgctgtttagcgatgatgatctctgagatacccttgagctcggtgtccttgttgtagtagtcgtcacgatagatgaacataacgacgtcggcatcctgctcgatagctcctgactctcgaaggtcagaaagcatcggtctgtgttccggtcgctgctctacggctcgtgatagctgggagagtgccactacagggactgaaagctctctggcgagcgccttaagtgaacgtgatatgtctgagatttcctgctgacgcgattctgagcctcgtcctgagcctgtcatgagctgcaggtaatcgatgatgacgagctttaagtcgtgttcgagcttgtatttacggcacttgcttcgaagctctgatatgctgatacccggagtgtcgtctatgatgagttcggagtctccgatgattccggctccctcgaccagcttttcccagtcggcatcagacagatttcctgtacgcagtgcctgcgcatctacctttgattcgagtgagaacagacggtttacgagctgctcctttgacatctcgagtgagaatatggctgtacacaaatgttcgtgaaatgccacatgctgtgctatgttgagcacgaaggccgtctttcccattgacggacgggctgccacgagcacgagatctgacggctgaagtcccgctgtcctgtagtcaaggtctatgaagcctgtcgggattcctgttactgtgccctcctgctgtgctgctttttcgattttctcgagggcattcatgactacagtacggattggcacgtagtcacctgtctgccttgtggaaagcagctcaaatacatcgtgctctgtcttgtcgagtacgctctcgagtgattccttgccggcgtagcactcgttctctatgtcctctgtcacatggatgagctttcgctttatggcattctcttttacgatattggcatagtacttgatgttggcagaggtcggcacactggtgacgagagttcgcacaaagtcaagactttgtatttcctgcggcacatccttttcctttaaacggttctggagtgtgacgagatctacaggctgaccctctgtaaagagctcaaccatggtctcaaatatgatgccgtactgctgatgataaaaatcctccttaaggagcatctcgctggcggtcactatggcatccttgctcataatcatggagccgaccacggactgctctgcctcaaggctgtttggcattattcgtttgattaatgcttcttccaaggggattcctcctatccttcaaccactgatactgtgaggtttgctgttacctttggatgaagcttgacaggcacctcatagtttccgagtgctttgattgactcgttaagctgcatctttttcttgtcgagctctaagccatgctgctcctttgctgcagccgatatctccttggtggagatggagccgaaggttctgccaccctctcctgagcgcagctttactactacctttgtgttctctactacccttgcgagtgcaagtgcactctcgtagttttcctgtgccaccttgtcagcgtgctggttctgaagctttaagtcatttaagttctttggagtagcctctactccgagctttttaggtatgatattgtttctggcgtaaccgtcacttacgtttactatctcgccttttttgcctaatggttttacgtcctgtaataagattactttcattcttctatgtctccttcttttagcatttcgtccagtgtatcctgtatcatgcgctttgcctgcacgatagtgacgccttcaagctgtgctcctgccacatttaagtgtccgccaccgcccagcttctccatgattatctggacatttatctcgtcgattgaacgagagctgatataaatcttgtcattgtactccgtgagcacaaatgatgccttgattcctattatattgagcagctcatttgccgcctgtgcaccgacgattgtcgggctctccacattctcgctagggcataccgatatggcaaacgagcccctgtatacctctgcatggcgtactgcctcggctcttgccttgtagcatgccatgtcgtttctaagcatctttctgacgcgtgttacctctgcgcctgagcgcttcaaaaaggctgcagcctcaaatgtacgcacgcctgtcttcgtcataaagttgttggtgtcgatgaggattcctgcgtagatgcagtcggcctctgtcgcattgatcttgactccatcgttgaagtactgcaatacctctgcgaccatctcacatgcacttgatgcatacggctcgatgtatgagagtataggattctctattatctcgctgctttgtctgtggtggtcaaatacgactattttttctgtctttctgaggagctcagggcactctgtgtagcttggcctgttggtgtccaccaccatgacaagcgtatccttgctcaccatctcgaggccctcctcactatttataaacatgtctgttggatagccctttgcctctgaaaatgtctccatgagaggtctgactgagcttgtcgggtcatttattactatctgtgcctttttgtcgagattcttggctgcacagtatatgcctatgcccgctccgagcgaatctacatctgtgatgctgtgacccatgataagcacattctcacaggtctcaatgatttcctgaagcgcctgtgccttgactctcgcctttacccttgtcttgctctccacctgctttgacttgccgccaaaatacaggatatcattgtgatcctttataactacctgatcaccgcctcgtccgagggccaggtctatggcatttcgcgcatatacgtagttttcattatacttatcgctctttataccgattccgatactgagtgtgaccgccatctcgttgccgacctttatagccttgacctcgtcgagcaccttgaacttgtcctccttcatgctgtcaaggtacttgtacttgaacaccacgaagtatttgtcgttttctatctttctgacaagtccgtcatacttggcaaagtactggtttacacgcctgtcgataagtgcaacgagcagtgacctctttacgtcctctatgctgtcgagcgcctcatcatagttgtcaatatacacaagcgctgagacctgcttctgctctgtgatttccttcttgcatcgataaagctccgactcatcaaatacgtacagcgccgtcaaaaactcgtctgcctcatttgtgtcgattatctcattttcctctgcgatagagttgaaatatattcttttgacggacagtctgactatgctgtcctcttcctcgtttactatcttgaaatctgtcggcgcatcactcttggtgagaagctccctggtcactgtcgggaaaagtgtcgtgatggatttgtgatagcttttatccacacccatgagctctgcgaatttgtcgtttacccagagtatcttgccggagtactcaagcagggcatacggcacctcaaactcattaagcagcctcttctgcaccgatgaatactgggttgcaaagctaatcagctcattggcaacaactgacttgcttctgacatacaaaagcagcacgaacgcaaagtaaaacactgtaaagcctaccatgccatagccaagctttctgtcatagcgcagtgctattccgtcagcacatatccacacaaacgtcagatatagcggccagcacatgtagcttttcagcctgcccttgaattttatttttttcttcattttactctccttatccccggtgcgctgcgatgatgctgccggtgcaacggttgcggtttcgagaatgtactacaaattaatagttaccggccacacctttgtgcagcccgcatcgattgatatacctattagagagtataccactttgtggggattattcctagtactatatttatcagtttggaattacaggagttcagggcaattatgtgtaatctaagcacaattctatgcaatctaaaaagcaccgcatatatctgatattgatatgatacatgcgatgctttttgtgtgctctcatcttccggtattcattttgattaaatataattacttctcagtcttatccgcagctatctctgcaattgactttgtaagacctgcaatcccctgaatctctgaagggatgattatctttgtagccttgccgtctgctgccttggcaaatgcctccaagctctttatctgcagcactgcgttgtctggatttgcctccttcaacatgcgcagtccgtctgcattggcctgctgtatcttgaggatagcctctgcctgacctgctgcctcctggattgttgcctccttctttgcctctgcgcgaaggatggctgcctgcttttcagcctcggcgtcgaggatgactgactctttatttccctctgcaacaaggattgttgattttttctcaccctctgcacgaagaattgcctctcgtctctcacgctctgccttcatctgcttctccatggcatcctggatggcctttggaggtatgatgttcttgagctcgacacggtttaccttgatgccccatggatctgttgccacatcgagtgttgcgcgcatcttggtgttgattgtctcacggctggtgagtgtctcatcaagctctaagtctccgatgatgttacgaagtgttgtggctgtgaggttctcaattgccataattggattctctactccgtatgcgtagagctttggatctgtaatctggaaatatactacagtgtctatctgcattgttacattatcctttgtgattacaggctgtggtgggaaatctaccacctgctcctttaagatgactttctttgctattctgtcgataaatggcaccttgaggtgaagtcctacgctccatgtagtgagatatcctcccaaacgctcaattaccatcgcatgtgcctgtggcacgattttgatgcagtttaccagtactataagtactattacgagtaacactgcaagtgctattaatccttccatttccggttaagcctcctttaccctttttacaattaattttactccgcttatctttactacctcgataagctcgccttttcttatgacctgtgtctcgtcctgcggtctgactgtccactcctgaccgtttacaacggcttttcccgtctgcttcatgctgtcagcatcctcggtgagcacagctctttctcctaccagactgtccacgtttgtcttcactgtcctggaattgatgtacttcccggcccatggctttgtgagagctaaaagcacgactgaaacgagtataaatgcaattccctgaaccacgacattgccgccaagcagtgcgattataaacgctacaaatgagcctgccgcaaaccatatggatgtgagcccgactgtcataagctcaactaaaacaaaaactacggtagctgccaaccagaaaacaatgtatgtatccatttgaaccctccctttttattagtatttgttttatattcattttatactatgtaatttgattatgcaacaaatattaattttttaaacataaaacatttttaacctaaaaaatcccgaccaccatccggtagtcgggatttatcatacatttatcttattcgcaaacgtatggcataagagcaagatgacgtgctctcttgattgctactgtaagagctctctggtgctttgcacagtttcctgtgatacggcgtggaaggatttttcctctctcagagatgtatctctttaatttgtttgtatctttgtaatcaatgacattgtcttttccacagaatacgcagactttttttcttctacgcattggtcttctcttcattgatgaaccatcagctgatttattgtaagccatttttgttacctccttgaatatttgtcctcgtggacactactaattgaatggaagctcctcgtcgattccgtccggaatgttcatgaagccatccccagcagcctggctaggtgcaggtctgtctgccggtgcaaatccgcctgcatttcctgatgcggctgatttggactctgcaaactctgcattctcaaccacgacgtcagtggtgtataccttctgtccgtccttgtttgtatagctgccggtctggattcgaccctcaacaacaaattttgttcctttacggccaaatctctcaaaaaattctgctatctttccaaaagctacgcagttgatgaaatccgttgactgctcctctgcattcttgctgtatcgtctgtctactgcaagtgaaaatcttgctattgcaagtgagttgtccccctgggcatagcggatttctgcgtctctggttaatctacccataagtattactttgttcataatacaatctcctattttcttatactatgcctcgtcttttctaacgcataagaaacgaagaacattgtccatgatacgaacgtcctgctcgatttctgctgggactgttccctcagcatcgaactggatgaagtaataaaaggcctcagtcatgtgctgaatctcgtaagctaatctcttcttaccagcctcctcaacttctgtaacagtaccgccggcacgtgtgatgtactcttttgccttctcgactactgctgttctcgcatcatcctcgatctttgcactaacgacgagtgctaattcatatttgttcatgcgaattttacctccttttggtctctggctcataaatctgattatgagcaaggaattttatatcacgagtttagataataacatgaatcatggtacttttcaaggggtttttgcaatttttctttaatttttattatgtcgggacatgcgctgtttctattactcaagcctgcttcttcgtgagaccgcggtcatttttctcgaccagctttctcggcaccataacctggtgtccgcagcccatgcatttcaggcggaagtctgctccgacacgcatgatttcccactcgctgctgccgcacggatgtggttttttcagttttacgatatctcctactgcgtatttatccatcctatattccttctctacctatatctgccatattatatactatgatatgagggtcaaaagatattttgcacctctatctgctcaaatacagagcccagtccctgctgtatcagaagatctgctcttgcgtccatcggtgtggtggacttgttgataagcacgagcttgtttccgttgtaatagtctatgaggcctgccgccggatataccgcaagtgatgtaccgcccactatgagcacatcggcgtgactgatgtagtagattgcatcctcaagcgttttctgatttaagccctcctcgtacaatacgacatcaggctttaccgggccgccacactttgggcattttggcacgcctgttgagtggaggatttcctctgcgcttacaaactgtaagcatctctcacagtagtttctcagcacactgccatgcagctccattacatttttgctgccggccttctggtgcagtccgtctatgttctgcgtcacaacgcccttaagctttcctgctttttcaagctctgccagcttgtaatgcgtgatgttcggctctgcatcaaggcagagcatcttgtcacggtaaaatcggtaaaactcctgcggatgcttcctgtaaaatgtatggctcaggatggtctctggcgggtagtcatacttctgattataaagtccgtcaacgcttctgaaatcaggtatgccgctctcggttgatacacctgctccgccgaaaaatacaatattgtccgaagcctttatccactgtaaaaatgtttctacactgctgtcattgttacccatatgtatccatcctttcttcttttcttctttaaattgctgcctattattttttgagccacacttttatagcttgcgcaccagcttgtccacatctgcattcaatccaagcaccatcactgcatcgtctgccttgaacacatagtccggcagcggaagcacgcgattctttccggcttcctttactgtaacgatatttacattgtatttctggcgcacattattttccatgatgctctttcctacccagccttcaggtggatttatctcgtagattgagtaatcatcgtttaatgccacataatcaagcacatggttggcgctgtatttctttgccactcgttctgccatgtcgcggtcaggatagataacctcatccgcaccgtttcgaagcaggaacttggcatgcacatccctgtttgccttgctgatgacgtattttccgcccatctccttcacgagacttgttatctcaagcgagctctggaaattggtgccgatacatacaaaaatcaaatcgaaattgttgattccgagtgcttttactacctgtgggtcggtacagtcacctatctgcaccttggtcacgtcatagattaaatccctgaccttggcctcgtccttgtccatcaccataatgtcgtttccgtttttaatcaaatccgcacacagatggtgtccgaatttacccattccaataattaaaattgatttcatttcgtttctccttatccttatccaatgataactttttcctccggaagctctatattggctttatccggtctatgcacaaacgaaagcacaaaggtcatgcttccgattcttccacaatacatcataattatgataattatgcgtcctactgtatttaaatctcttgtgatgcctgttgtcatgccgaccgtactgattgcagagtatacctcaaacagtacatcgtccatcttcatattggatgtggcaagtatagctatcaccgctgtaagtccaagcaccagattgatgataagcaccattccggcctttttgattacctcactgcttattttcctgccaaacacattgcagccgttgcttcctctcatataagaaacaatatagattatcatgaccgccatggttgtggttttgattccgccggctgtcgagcccgggcttcctcctatgaacatgagcactatagtcaaaagcttgctctcctgtgtcagtgctgctgtgtctactgtattgaagcctgccgttctcgccgtaactgagccgaataacgatgcaaatatggcacccggtgtatccatgcctgctatggtattacttttttcaaaaatatacataaacagtccgccaccgaagacaagtatcagtgtggttgatattactatcttggcgtggagcgagtatctgctaaacttaagctttttggttctgacctcattccatatggtaaaaccgataccacctatgatgataagcagcataattgtgatattgactaacggatctgcggcatattttgtaaacgatgagtactcctcgtttatgcccatcaaatcaaagcctgcattgcaaaatgcagatatcgagtggaacaccgagaaatatatgcctcttaatatgccaaaatctggtatgaagcggattgctaaaagcaccgctcctataccttcgataaggaaggttccccttattatcacgctgaaaagccttactattccaccaatctcgagtgcattgacgctctcctgcatcagatccctctgtctgagtccgatttttttgtgcagaagcatggaaaatgccacaccgattgagatgaagcccatgcctcctatctgaatcagcaccagaatcacgagctgccctataatactccagtgtctgaaagtatcaaacacaacaagacctgtcacacaggttgcgcttgttgccgtaaaaagtgagtccaggaaattagtccattgtccgtctcttgaagaaaacggaaggctcagcattattgcccctgataatattgtcagaaaaaagccaactgcgatgtatctgaactctgtcaggttcttatgtcgtttttttatgtcatgttttatatcgttcatatccaatcctaactatttgctgcagaatgtattattgtcagctcacagaagctgtctgtatatgtccctcttgctgacacctctgtcctttgccacgagcttcatggcttccttcctgtcgatgccctgtgactcatagtgtgccatatgctcttcaagaggcatggcttcccagctttcctgctgctcctttgctatttcagccacgtttctgccacagattacaagcacatattcacctcttggctcctgtgtccttgaacgctccaaaagctccgaaaatgtagtctgcaccttttcctcgtgctttttcgtaagctccctgcacacggtaagctctctgtccccgagcgcattataaagctctgtgaccgtctttataagatgatgaggcgcctcgtagattatgattgtccgggtctcgtttttaagctcctcaatgacgcgcgcgcgttcctttttatccctcggcaaaaatgcctcaaacgcaaacctcctggtcggcctgcccgacatggtaagtgctgtaatgcacgctgccgcccctggaagcgaggtaacaggcacgccctcctcgtagcagatgcgcacgatgtcctcacccgggtcagaaatgccgggtgttcctgcatcggtgatgagggctatatttttgccctccttaagctttgccacaagctggtaagctttatctatcttgttaaactcatgatagctcgtcatgggtgtctttatctcaaaatgattgagcagctttatggagtttctcgtatcctccgctgcgatgaggtctacctccttaagtgtgcgcagcacacggaatgtgatgtcctccaaatttcctatcggagttgcgcacagatacagtgttcctgtcatatgattctcctgttattttccgttattccgaggcttatcgccgtatatctcatatatctcatccgtgtatacattaggttccttgtatacaaccagaggtttttcgatggttatacggcttttgccgccctttaacccctctatgagcaccatgttcggctccctgtccgcgtagggatgcacaaggcgcatgcgctttggctcgatatgatatttcatcatcgtgctaaagatctctgccagcctgaatggtctgtgaaccatgtaaaaacgcccattgaatttgagcatttttgcgctctccctgactatatcgtcaagtgtacacctgacctcgtggcgtgctatcgtcatggcatcgtctgcatttttgataccgtgctgacctatcatatacggcggatttaccgtcaccacctccacggactcgcgcccgaaaagctctgaggcattgcacacatcgccctcttctatggtcactttgtcctcaagatggttatatttcacacttcttctcgccaggtctgcacacttaggctgaagctcgagcccgctgtaatgctctccgttattttttgcctcaagaagtatcggaatcacaccgtttccggtgcacaaatccacagctctctcgccgcgctttacctttgcatagtcagataaaagcacggcgtctatgccgaagcagaacagctttggatcctgtatgagcctatagcccttgcggcacaaatcgtccaggcgctcattactgtgtatcagtgcttccattgtctttgtccctgttgtaatctttattatactctttattatagtttttgttcttgtaatccttgttgcggttgtatttctgcttgtttggtctgtttttgccgcccttgtacggctttttgtaaccgtccttattttctctgccggcatttgcagcatttacttcatttgtctcatttgcagaagcttccgctgcctctatgtccgccctgtacggacgtttttctctgttgtcacgcttatcacggcgctcgcgatattcatttttgttgtcacggtgtccacggtttctctgcggtttctcctgtgacttgtcctccatcgtctcgtcgccgctatcctcgagatccttgagctcgcgaagctcctcctcggtgagctttacatcctttttctggcgcggctttaagcgcagatcatctacagtgtactcacgaagctccttctcctcgccgttgtcaatgacaacacgcacgagctgcctgagcacgctgactgacttgacctctccgatgattccctcaggtgtctttaccttttctcctaccgacggcattctgctgttcagatactcatatgtatcctgctcatacttgagacagcacataagccttccgcacacaccggatatcttggttggattgagcgagagattctgctcctttgccatcttgatggaaaccggcacaaaatccgccatataagaatgacagcagagcggtctgccgcatattccaatgcctcccatcatcttggtctcatccctgacaccgatctgacgaagctcgattctcgtgcggaataccgctgccagatcctttacgagctccctgaagtcaattctgccgtccgctgtaaagtaaaacaacagcttgtttccatcaaaggtatactctgcatccaccagcttcatttcaagtccgtgcttgatgattttctccttgcagatggcaaatgcctctttttccttttccttatttctctcaaccgttttctcatcctcgtcggttgccactctgatgacaggcttaagcggtgaaaccaccttatcatcatccacctccttcggcggaatgaggacagttcccatctctatgcctcttgctgtctccacgataacatgcattgccatgtcgaggtcgaaatcagccgggtcaaagtaatatattttgcctgctgtcctgaatctgataccaactatttttgtcatgtgattagttctcctttatggtcataagcagcagctcaattaccaggtcaaaattgacgtttgcgttaattcttatcttcgccttctcaagcgcctcaagtattgcctcgattccctgataggaatgctttgctgcctgtttctttatatcatagacctcatccttgaatatgagtccgttaacatcgtttgtcgccttcatatacagcacatctctgtaccacaccataatcaggtcaaaataatcctgcaccttaagcttgtactcagctatctgctttactgctgcgcccagctcgtacaaatctatgtcatcgaggcgctttataagcgacagtgctgactcctttagctcgttgaactcgtctgatgaggcgagcttaacagcctttccgacgatgccctgtgcaaatgcggcactgatatcagcctgataatccggaatatgcttttcgttcatcaggtatgcctttatcacctcgtcctttaccgacttcatattgagtgtgatgcagcgcgacctgatggtctgcagaaagctgtctgcattggtggtgagaagcatgatgaccgcatatgccggtggctcctcaatggtctttaaaagcgcgttctgcgcctgctggttcattttttcagcctcatccactatgtaaatcttgtatttactgctgtacggctttatcactatatcgttgttgagctgtgtccttatgtcgtcaaccgatatgttgttgggcttttcatgactgacatatatgatatcaggatgattgtggtcatctgcctgatggcacgatttgcactctccacaaccgtctgtgccctccttctcacactgcagtgccctggcaaatgcctcggctatcatcattttgccggacagctgtggtccgtttattatatatgcatgtgagacctttcccattgatatggcattttgcagatgctctattatctgctcatttcctactatatccttaaatcctgccatagctgctgcctccttattcgtttccggttacatttatgttcaggccgtaaccattttcctgctctgcaattaagagctctgtcgtatgtattctgaaatctcggcaagcacagtgtccatatcatcatttacgaaacggtgtgtaatacccgcctcatgcaacttctcctcagagaaatctgatgcgtctgccagaaaacgacggcacatctcctcatatttaggcacctgctgccccttttcccggtgaatggcgcgtatcagacggtcgccatcctccacctccacatagattggcagtaccttgtcactgccaaaataatcgcgtatctttgtgtaagactcgagtgttccgactgtcagatagcttttgcagcgaaggtctatatcatcatcatttaccgtgaaatatttccacacgccgtacactgtattgtactctcgaagctctatgatgcgcccctgtgcactgagcctttttacatcctcttcattgcagaaatgataatccttatcctgtgtctctccgtcccttatcgggcgcgtggtatacgggataatcctgctaagcatgagggaatcatcctgcagtattttgttgtatatagtgtccttgcctgatgcgctttttcccatcacgcagaaaatcttacccatctgtaaacctcttatattttaattagtataaatatgattgtttgctatgtcaaactgttgcttacagcaccgcaacaaacttccacatattggcacccggatcaaaatccaggccatccacttcaagacctgaatttacagcctttattacatcatctatgagcttgtcgttcattatctctcccggcaccacaagcggtatccccggcggatatatatttataaaggcaccgctcaccttcccgcttgccttaaaggcatagaccgcctgattgtctgcatcatatgcatcatacatttccattacggcaggcagcttttggtatatagttgtatccattttgacaggcaggtaaaatttatgtaccacaccctcctgttttaatatatcataaaactcttcaaaatcagacttatatttttcgagctggctgtctatttcaatcaaagcatccgcaagcctgtcaaagtcctcatccgtatccatgacagatgccagcgccagtacataattgcctgctgccatctcaagctgcagctcatattttttgagcagaagctcaagcagcgtatgtccattcatagcctctttcgtaaatataataatctttgactcgtcaaaatcatatgcctcgtcagcagaaaaatcactttttctgaccaccttcagatgcgaaagtccgctgaccttctgataaaatctgtcaagtctgctcctaagctgtgcaaatgctgtctctttattatcgcgcacatagtgtatgcagcgctctatgcctgtcataagcacatatgacggtgagcttgtctcataaatgccgagaaacttctccactgcagcttcacgcatcccacccagtagcaaaagcgccgtctgtgtaaatgccggaagcgtcttgtgcaggctcactatgaccgcatcggccccgagcgctatggcattttgagggaagccgcctccaaagccaaagtgcgcgccatgtgcctcgtcaactatgagcaaagctccatgtgcatgtgccacagatgcgattgccgccacatcggaaaccacaccatcatatgtaggagaggttatcacaaccgcttttatgtcgggattttcatcaaatgccgcccttatctgtgcctcggttatctgcccctgcagccctgtccgtgtaatttcagggtatgtaaacaccgggtgaagctgccttaagtaaagcgcatgatacaccgccttgtgacagttccttgctacaagcaccttgtctccccttttggtggccgcagatattgctgccagtataccgcaggtgcttccgtttatgagaaaatatgcatgctttgccccataaagtgccgctgcctcagcctgcgcctcctttataatgccctcagcgtggtgcagattgtcaaaattgtctatctctgtgatatcaatagcatacgggtccagccctgcacctatatcactgccacggcgcttatgccccggcatgtgaaacggataaatatttgattgtgaattatttatcagttctttttccatttaagtaccttgcttatcggctaaaagcctctcagcatcacgtaatccaagctgatacaggctctcaagcttattaggatccttttctaccttgcttattttaatgtgctccgacggccttaacacctcggcaatgccctgcttttcaagctccttaagatgttcaagctgataattgtacatgatatgcctgtttgaaaatgcctcataaaacctcggaaaacgctttttgtataccgatgtaaaaacccttggcataggtttttttatatagtctgccggctttgtcagcacgacaaccactctgtcatatcccatatcaagcatatgctcatatgggatactgtccgtcaccgcaccatccagataccactcattccccagcttcacaggctttgacactacaggcatggagcccgatgccctgagcacatccatctggtcaaagacactctttatctgcacatattcaggcttacctgtcctgatattcgtcacaaccgcataaaatgggatatccgacttcttatattcctcatcatcaaacgggtcaagctctcttggtactgtatcataggcatatttcgtgctcactatgtttttctcccgaagaagaggcctgatacccatataatttttgtcactgttaaacctcttattgtatcgtataaccctgccgcgctgctttgacagcagattcactccaaaaagtgctcccgccgaaacaccgataacagcatcaaagctaatatcatggtccataaaacagtcgagtactccggctgtatacatacctctcatggctccaccctcaagcacgagggcgcatctttcatcactcatttctgcctccatttataatgtcataataaaaaatgtattaatatttatgtctgccgctgaacttcagattgtctctccttctgcgccgttttctttcaagcttgtgctctctgaagcgctcgcgctgctccttcttaatgctccatttgtgtttcaacacatatatattgtctgatattcttctaaacatgaaaatactcagaataatcactgcgataagtacgagcacccagagaaaatataccggttttatccttattatatcactttccaaattctgtctgctgttctcatcaaagtacgacagatcgacttttgctcctgatttcagcagatccacacagcctaccacatgatcacaatacttgtatctgaccgtagcaagagcatccttgttgtcggacttcatgtcagcagcttcccttttaacgcttgaaaaatccgcgttgtttggcaaaacaacatagttttccgacacctttgcatacatgccgtgctcattcatcacgcccagatccggcgtattgtcagtagctgcgctgttttcattttcagctatgcttagtgccttgaagttactgaaatagtaattgagcagcgtatttgtgtctgcatactggtcaggcgactgcgcattcataataaccacgcacagcgtcaagccatccttctccgcataagtgacaagcgtgctgttagccactgaagtgtagccggtcttgccgccggtacaatcctgatttacaaactgtgaatacgacttaaatggatgcagcatcgcatgatgattgtacagcggggtatcctcggtatgcttgtttgtaggtggtatgatataggtctttgtgcctgtaatctttcgaaactcgtcattcctgtatgctgcacacgagataagccccatatcgtatgcgcttgtccagtgattttcatcgggcagaccatttgcattgttgaaatgtgtatctgtacagcctaattctttggcttccttgttcatcagatcaataaatgtgctgtaatctcccccaagctttttgcctgtatgctctgctgcagcatatgcgcactcgtttgccgactcaagcataactccatatagtgtctgctccatggtcatctcctcgcccacatccctcttgatgctcgacgaaccatcactgctctccttcaccgcctcttttgagaatgtaaccttctcatccatcttgcagttgagtatagccagatatgtggtgagaatctttgtgatacttgcaggataatgcttttcgtgtgaatttttctcatagagcaccgtacccgtattgacctccatcaccacggcacatggtgcatttatctgcggtccctccggccagtacgtgtcatcaccatccgcaaatgccataagcggtctcgcacaaagcgtcgtgaccatagcaaacactgccattattaatattcctgatttttttaaatttataattttatgcttcatatctgttcctattaattctaaaattgggtagctgttcagtactataaccaaaaatgtactatttctaattataatgtatgaaaaacatgttatcaagggcatgtgcagcgtattttgctattttattttgacacccacacaattgtagggtattatctatatgaaattttacgtttttataaggagatttacatgagacttagaaatatccctggcgccggtgaagtcatcgacaacagcccttattgcataaaggagcctgttgaattaaaaggaaaatggcatgattttttaggaaacaataatccgattcatatagaggttggtatgggaaagggcagatttctgatggatctggcacggcttcatcccgagattaactatataggtatcgaacgatataccagtgtgcttcttcgtgctgtacaaaaaatgcaggaggacgagctgccaaatgtgcactttttgtgcattgatgccgcaactcttccggatatttttgaccgcaatgaggttgaccgcatttacctgaacttttccgatccatggccgaaggacaggcacgcaagaagacgtctcacctcaagcgaatttcttgccagatatgatttgtttctcgcacctgacggacgcatagagttcaagactgacaaccaggacctcttcaccttctctctggaagagatcgaaagctctgataaatggcacctcgacgccagtacacgcgacctgcatcatgatgccgcaatgaatgagggcaacatcatgaccgagtacgaggagaaattctctgctgtcggaaaccctatctgcaaactgattgcttcaagataatgcgacatatctgtcgttaatcgcatgatttatatagtcaaacatgacccagcttttatgacattcttcagatttttctgaggaactgtcatattcgtctctggcatcgttgaaatatctctgcgcttccttatctcttcccatcttgctatagcttgaaccgatattactgtaaaccatagccttaagatctctcgagcggataatttctgccgtggcaaggctctccagctaacattcaaaggcttttgactcatcgttctcaagctcatataccaatcccaggatattgagatactctgcatatttttccacgtgaccggtgctcttcaagcgtgcaagcgctttctttatgcgtacaaccgcactatcatagtccttctttaccacgtcatctactgcaattatcatttcgttatccgctatattgtctgttgaatatttgtctaccgcgttcatcatattttactccgaccaaagcatctttccaaatgttacttttttcctatttaacagtataaactcattattttaaaatttcaatattaatttcacttttatgtgcataagctgccagcctatccaaataatgacatgataccttttgatcctttaatcatgatataatgagtgcaagtgagaagaatgcatttatgcattcggcgaacgacgaatgttgatcatgaagcaaagcttcatgatataataaaaaagcaccaaccctatggctcatacgtccataaaaccggtacctttgagtgcgcctccaggggctcgaaccctgcacaccctgattaagagtcaggtgctctaccaaatgagctagaagcgcgtttattaatttgtttgcgttttccttaacgcgaaatttattatatagtatagtttatagaaatgcaacacttttttttaatttttttaaattttttttagattttttgtaaaacagttgattttacaccgttttaagctatattattttctatatacagagactttttattccagatttccaatccaaagtctctcagaaaggaattactgataatgaaagtagaagaaagattattaaaatatgtgggctatcacaccacatctgatgaagcaagtgataaaataccaagcagcgacagggaatttgcactcgcaaaagagcttgagtcagagcttaaggagcttggcttatccaaggttgtgctcactgaccattgttacgtgtatggtctgctgcctgccactgccggcatggagcacaaaaaagcggtcggatttattgcacatatggatactgcacctgatttttccggggaaaatgtcaagccacagctactgcgtcactatgatggaagcgatgtgctgcttagaggcagtggtgaatacctgagagtaagcgattttcctgagcttaaagccctctccggacgcactctcattaccacagatggcactaccctgcttggtgccgatgacaaggccggtgtggctgagattatgaccgccttagagcagattatcgcagagggcactcctcacggcgatatctgggttggatttacccctgatgaggaggtcggaaaaggtgcggatttgtttgatctggactatttcgaggcagattttgcctacaccgtggatggtgattacgagggcgaggtggcctatgaaaactttaatgccgcaagcgctgaatttaccataaagggcgtcaacgtgcatccgggcgaggcaaaggacattatggtcaatgctgctttggttggctgcgagattgccgcagctctgcctgcaaacgagactcctgccacaactgagggcagagagggcttttaccatctgtgtgatatgagcggtgatgtagcatcagcccatctgtcatatattgtgcgcgaccacgacaaggctctttttgctaaaagacttgatactcttcgctctcttgagatagagatgaacaaaaaatatggtgagggcactgtttctttgactatcacccactcctacgagaatatgctttcaatcataatggacaacatgtacattatcgacctggctaaggctgctatagaggaaaacggtctagagccgctatcacgcccggttcgcggcggtacagacggcgcacgtttatccttcatgggacttccttgtccaaacctcggtaccggcggctacggcttccacggcccatttgagcacatatcagtggaaggcatggagactgcggtcaatataatcaaatcaattgtgaagcatgtgctgatgctggctgacgcgtaatttcgtgccggtcaattactgttcacaactaacagtgtaaccagtaatccggctgcgctttagtgtagacaatagctgatttatgtattgacttatctgacaattctgctataatgatggcaaccaattgtttttcgtttattttcgaacgaataattacagctttttttgaaactgacagatgtttcagaagggagaccatatggtagtacttgcagcacttatcatttttgcagttgttggtggaatatttgtaaattatcttcgcagaaatcagaatgatatcggcggaggaatgggaaaggattacatgaaagagcattggggaatcgatgacgacaagtaatcaaaaataccgggcaacacattttgtgtcccggtattttttatacaaccatcgtaactattcagaaccactgagaacaagaaatgctgatgcgttatcagaaaagcctgactttgctatcgtgaatttgcaggctccatgttcacagagcggccctttatctttgcattcttcatggcattaagcacttccttgccatactcagccggcacctcaacaaatgtatacttatcgtacatgtcgattgctccgacaagcctgccaggcatgcctgactcgcctgcaatggcacctaaaatgtcgcccggctttatcttgtccttctttccgacgttgataaacaggcgtaccatgccatcctcagctcctgtattgtggaaatcatagtcgtcctttgattcagctgtggatatctctgaagcacccatagcctggtataaaaatgccgccgctatatccattgccgtgtaatctgactcatttatctgattctctataatatcaatgacacttgtgagattttcctcatctataatggttgaaatctggtccatgatcttttctgccctgattttggcaacatcatcagatgatggaattggctgtgcatagatttttgtcttgcagtagcgctgtatgtccttaagcttatatacctccttgccctttacaaaggagaatgcctttccacagcggcctgctcttcctgtacgaccgattctatgtacataatactcgtcatcctgaggcagatcataattgaaaacagcctccacatcatccacatcgattccgcgcgctgcgacatcagtggcaataagaatatctgtctttccgtttctgaagttcttcatgacacgatctctctgcacctgcttcatatcgccatgaagtccctctgcactgtagccgcgtccgcaaagctcatatgccagctcgtcgaccatcttcttggtgttgcagaatacaagtgagagctttggattatagtaatccaacagtcttgtgagtacatctatcttgtccttgcgcttcacatcatagtaatactggtcgatgtttgcgactgtcagctcttttttcacaatcttgatattgatagcatcatgctgatattttcttgtaatttccaaaataggctttggcattgttgccgagaagagtactgtctgatgctcctgtggcaggtattcgagcactgtctcgatgtcctccctaaagcccatgttgagcatctcgtctgcctcgtcgagcactattgtctttacatggtcaggcctgattgtctttctcctgagatgatccataagacgtcccggagttccgataataatctgcacaccgcccttaagtgccttaatctggcggctgatatcctgtcctccgtataccggaagtaccttcacaccatgcatatattttgcaagcttcctgatttcatctgccacctgaatggcaagctcccttgtaggagagaggatgataacctgtgtcttgtgacttgatgcatcaacgctctcaagcaccggaataccaaaggctgctgtctttcctgttccggtctgcgcctgtccgattacatccctgcccgaaagtactgccgggattccctgagcctgtattggagttgcctcctcaaagcccatatccttgattcctcgcaaaatcttagggtttagttctaattcgtcaaatctgattgtttccatatattttttatatttcctttcaaaaaaataaagtgtgcatatttttataacatgcacactttaacatatttgtgagataattacaaaatattatttcttcttttacaaaatactacatactgttcctccctcctgtcctcctttagagcattcagtgagaaaaatccacttattactcccctgataattgtaaacctttattgcattcatggttgacaattgacatcttttcatgttaatgtgttaaccgtacaaaaaatactatgaaatttacaaaaaggagattttatcatgaatcagacagaaactatagactacaagcatggaacgacctatgccataacagtaacagcgctcatgacagctgtcacatgtattcttgcaccattatctatcccgattgggccggtaccaatttcactgacaaatctagccatatatatttcattatatctgctcggatggaaacgcggaacaatcagctacctgatttacctgcttataggacttgtcggaatccctgtattttcaggcttcaccggtggcccagctaagcttgccggtcctacaggcggatacatcatcggttttattgccatggcaattattgcaggacttgtaatcgatcatttccaccagccttggctccagctcattggtatgattgtcggaactatcatatgctatgtgctcggtacagcatggttctgctttgaggcaaaaagcacagtcagcggtgcactctcaatatgtgtgctcccatttatcccgggcgacctgataaaaatgataattgccatgcttatcggaccggctattaaaaaaagacttcgctaaacatcaactccaagctttttaagctcctgatacaggcgcgctaccggaagccctaccacattattgtaatcaccatgtattcccttaatgtggatggcaaagcgtccctgtatcccgtagcttcctgctttatccatcggatccccgcttgaaatatagcggtcaatttcctcttccgtcagtgtatgcatgctgacatccgtcttctcataaaagcagtgttctccggttcttccgtctttgtcaataaacacaaacgttacccctgtatagacactgtgcgtttttcccgaaagcatcaaaagcatacgcctggcatcttcttcgtccttcggctttccaagaatctgattctcataagccactaccgtatccgctccgattacaagaatatcctgcggtgtcacaagctctgcatgctgttcattgtaggtaagcacacctgacgctacctcctctgccttttgacgggatagctccatgacaaccgcagatggctcctcctctgtgattatctcttctccctttgcaggacagacaacaaactctgccccaatctgctctaataattccttccggcgcggtgatgccgatgccaatattatctgactcatatttgttttaaccttttccttcactttggattttggggctgtttcatctgaagaatacaattccctatgactgattacacgtttccacttgtattatagagctttctctttcaccgatactttcactgacataattctataaaatacagcacaaaataccaacgcaaaaacgactccaaacacattctgaataaccctgaggctgactgctccctttaacccatagctctctgcagctatagccagagcaccaaatgtattaaaaacagcctgccagccgtattgtgccgataatcccacgccgattccacctatgattcctatgtacgcatagattgatggtggaagcagaaaatataatgccgtgaagcatataacaccggcgatattaccgacaatcctttttctgactctgtactgcatatcctccataaacggcaggatggcagacatggctgcaatacctgcccacattgcacgcggcatattgcaaagctgcgcaatacatagaactaacggtacgcatagtatctggcacagctgccatttcgttcgtgatgaaaaaagatcaaactcctgaattacggctttcatatttctcttaaagactctgtttttatgatttctgtaaaataccaggcatgtgaggacagcacctgcagccatccctgctattcgaagcatatagctttttcctgatacatcatatccatataacaataaatagccaagaaccagtgtggattgattaaacataaatggattatggcatccgaacaaaatcagcactgcaagagctgcaatgtttataagcagcgccggaagcggtgaaagctgatttgccagatgcggacatactgtcataattacaaagaacaatgccaaaagccatgtagagtgtccggtatggattcccagatcagcgtttcgaaataccataacgcataataaaaccactactcctacaatactgttatcctttcccaatataatgcttgaggcagtgacaaaggcaaagcaaaaaaccatcgtaacagctatcttcaccatgtatacaaacgtatggtatagtttttctttcattgttttactatttttcaacaggcttttagagcctgcctgatttaactgcagttcctgataaaatgtcatatgaattctcctatcttctatcttattattttatgatatgagggtcaaaaggtattttgcccctcatttatgattatttattggcagttctactacaaatctgcatcctccgtattcccggttttcagcttttattgttccaccggcgatgtctacaattcttttcacaagtgccaggccaaggccgtttccctcggctttatgggaaccatccacctgataaaacttatcaaatattctggcttttgcatcatccgcgattcccggtccctcatcttccagaataaactgcacagaatcattttcatgccttagaaacatggtgatggtcccattttcagggctaaacttgattgcattatccaaaagattcatccagatatgcataaaaagcccttcatttccaacatatctgacctcctccatctccacctgaaagccaattcctttttcagtccatttgtcttccaatgcaagaaatgcctgacggatttgttcatccagacgatagttgttttttttcattggaatattctgattttccagccttgataacaataaaatatttccaacaagacctgaaagcctttgagtattaaacaggattttttctacatacccctcctgctcctgtgacagctcatctccctgaagcagcatcgtatagccttcaattgcattgattggagtcttgaactcatgagaaacattggatacaaaatccatttgcagcatctctgttgcacgaagctcttttgtcatgacattaaagctctgataggattctccaatctcggctatgcggctgtttgtttccaaatgctgttcaaaatctccctgagaaactgctttcattgctttactgagcctggtaatcggctccagcagccttgcattgataaatgatgtaataagtcctgctatcaatgtattaaaaatcaaaagccagccaaggcccggtattttcccgggcaaatccaaaaaatgattcaaaaacgcaaataacagggctgatatcagcatagaaaatgcaagtgccagccagattgcaccgatcagacacgagcggatacgcaattcttttttctttttatgttccattattttttcaccaccttgtatcccagaccacgcattgttacaatttcgaaatccggatttcctttaaaacgctccctgattcttcctatatgtacctctatcgtatgtgggtctgcctccgtctcatatccccatacctcatccattagctgctgcttcgtaaatgtcctgcccggtgaagctgccagcttatataaaagcaggaattccttttttggcagaacaagagtttcatcaccggtcacaactgtcattgcatcataatcaaactcggttgagccaatcacaattttgtgttcgttcagtatctgtgcacgacgaagcagtgcccctaccctcaaaaccatttcattgacatttacgggttttaccatataatcatcacttcccgaaagaaagccctgacgcatatcatcgaagctgctttttgcagtaatcataagcaccggtatctgatatcccgccgaacgaagctccgacacaagttcatatccatccataaccggcatcattatatcggaaatgattaaatcaatatactctctgtccaatacctccagtgcctgtgctccatccgacgctcttttgacctgatatccgctcttttcaagcaccttttggaataacagacttaattctttatcatcttctacaattaatatcttaaacacgatttatgttctcctttaatcaaaacaaatcccttgcccatccaagcagatgctgtaccagaaacacctttcttttatgtttttctgttaattcaatcggctttacatgatacggatcataatatgttccgtcgtctaatacctgtctggacacgctctcatactccatcatgccatcctccagctgtttattaatctctttactgcgtattacaagcatcagctctgtatccagataagtacttctcatgtccatattgaatgaacctattactgacagatcatcgtcaatcagaatactttttccatgatacgaataaccgccttcatattcccagatgtcaattcctgtttctaaaattctgtttctgtttttggcataatcagcagctccaaatggatttccgttattcgcaacagaatttgtcataatagaaaagtccggaaccttctgtgcaatttcctcccatgtattatacatcatatcattgcaaataatatatggtgtatgaatttttacgcgttcctttgcatttttcattaattctcccagctgataccataccaccggttccttagcttgggtgtggattgggtttgataacaatgtaatcttttctgtttcaaaggtttcatccgcataatctgtatcacaaattttttccttattaacttcaaaatattgctgatacccttcctgcagctctaaaactgctttctttacagactgtctgtcagctaattttttactgttatgaaaataccgacagtcctcctgttcccatattgtttcaaaataattccaaagctgattgaccgaattatctttctgtggctcatcgcagacaactaacacatcccggtcaaaatttttatgccccggaaaatcacccaaaaaataattatatgtgtttcttccgccaagaatatatattttaccatctgcaatcagatatttatcatgcattcttcccattgtcttccatggcttaagcggatttgctttattgtacagcttaatctcaacattctcatgcgaagataatccataaaaatatggattaccctccatatcaatccagctctccattccatctaccaatatgcggacatgtacgcctctgtctgccgcatcatgcagtgctcctaaaatcaattttccgctttcgtctgatttaaatgcaaatgtagaaaggattatttcagcctttgcattttggattaatctcactctttctaaaagagcctgcgaatttttttcaatgattactgctctttccgtattctctctccccgccacactcataatattttgtgtttcctttataatagcatcagacaccgctggctgttttttatatgtgatgcagattccgattaactcataaaaagccacacacaaaaaaactgacagtatagccaaaataattttacatattttatgccttttcattgtacattacctgattccttgtattttatactcatacaatacaatgtcaatctcaattttacctcaacagaattgattttatgcaaaaagacaggaaaaagcagctgcctgcaatttcctgtccatataatttttaaagcacaattacggcagcgtcaagcccctctacttttccgtcaaatgcgctatctgtcagcagattatatttctcggcatactcattaaattcctttgcactgttgccacaattgaaaagcattgcgatggtctcctcgccattttttctaatcataacaatcgtatcctcatcatcatttgcgattgtctcaatcatttcgccctctacaatgcatgcatgtgtttttctaacctgcatgagcttcttataccaattatacatctccttgtcctgatattcttcatcccagtacatgcctcgtctgcagtccggatcgtttgctcccggcatggcatactcatcgccatagtaaaccataggcattcccggcagtaacagctgaaaggctgctgcgagatgctgttttttcttattatcgttgcacagatgtagaaatcttgctgtatcatggctgtcaatcaggttccacatcagaggatagcactttttgtttaagcgtcccttcagatatcccagattctgtacaaactgactgacattaatcttttcgtctgcaagcaggtctatcagattcaggtagaatggatagttcattacagtatcccactcatctccctcgaggaagtcgcctgcgtagtgccatatctcaccaattatcagcatatccttctttacagccttgattgcctttctgaaattcttccagaagaaatgactgatttcatctcctacatccagtctccatccgtcaatatcacattccttaatccagtagcaggcaacatccgtgatgtatttttcaacctcaggatttttcagattaagctttggcattccaccgtaatagccgaagcatttgaagtttggaatttctccccattcacccctaggcggcagctcgtcgataaaataccagtcgagatattttgacttttcgcccttttcaagtatatcctgaaatgcaaaaaattctcttcctgtgtgattgtataccgcatccagcactaccttcatgccacgctcgtgagatttttgtacgagctcctttaagtcctctgttgtgccaaatgatgggtcaacctgataataatcaatagtatcatacttatggcatgaatttgatttaaagattggtgtcagatacaccacatcgattcccagatttttaatataatccagatgctctatgattcccctgagattgccatgcaaatcatccataggcgtaatcggcgctttataccacagctttttgtccaccggctgtgttgtggcaaagcgcgacggaaaaatctgatacactaccttgttggctgcccactgtggcacctcaaacatctcttcctctctgaggttctgcgggcagtcaaacattctgtccctgtttgtgatgcactccttgtcgaactcataattgccgtaatataccttttcaccctgcatgtccgtaaattcaaaaaagtatctcagacatatcagattcatccgaagctgagcttcataataatcgtgaaactgtgaggttgctaccttcttcataggaagagtcattcgcgtatccttgcgctccataggtatatacttgtcctcatagtgaaggattacctccttcatatcatccttttttacctgcacgcgtatcacaaacaaatccttatctatcgcatagcagaatcttttatccatgtcatgaaaaattgctgaatattccataaaatgcccctttacttacgtatttcattattttgtattttaacgcactcttttaaacaattctatcattatatccatgacattttttcactatttctactttatgcatgattttagcttaataacatttaatttttttgactttattctctaaaacactgcgttcattatatcactgcacactcagatagcttgtcacacagtaaagtgtctgtccattatattccacgcgtgaccagccaaactcctcattgattccggtcctggtgactgtttccccattttttatcgttgcgatgactgtagcatccggatttgtgacacttggaagtgcacgcagattaacctctatctttgcagtgacagtatcattacaatccttgaactttgtcttcagtccgtctccgctgccacttccgtcctgtccgggaactacatagttcatatctgttgtgaggtaacttgaaatggcatagtatgtctgtccattatattcgatacgtgaccatccactgtcactgatccctgttcttgctgccgtatcaccgttattgagcgttgccttaattgtgctgtcattgccctgactcggaatatccctcagattgacgctctccttggcagttacagtctcatttacatccgaaaacttcatgtttgcttccgggtcagctgttgcattgtcagccgcatcaccattttttgcagactctgtctcatcaaaaccaaagtatgccacattcaaatctaccggcttatcaatccctgacacctttcccttattggtatactgccacatagcatgtgtgccctcataagatgactgtggtgtttccggataagctgtatccggatattgtgacacccagattttgtacctgctctcaagcgttttagtatcccactggctgtttgccgacaactcattcattgcagcgtaaaacataggtgtatatcctttattatatatttcctgcaaaaatgcctcagctactttggtgcgtgcctctgatgacatgccatactgtctgctggctgagtcagtgaagccctcgcagtcaaatgccaccggatatgtaatctgatattttgatatgtagtctgctacccagtctgcctcctcaatggcttctgtttcatttactgctgatgagaagaaatacactccaacctttatgccatttttctgcgcctcctgcatgttgtatcttgcatttgtatcaacacacatctcgcctgttttctgggttctgtagcccacacgtatcatcgcaaaatcaattccgcctgcggcaaccttgtcccactttatggtgccctgatatttagatacatcaattccgaaggtcagattactgttttccgcaacagagcttgcagacagtatctgtgtctcatccgcagaagccccatcatcagatgtcacactcattgagccggcattgtctcccgtatgctgcgggtcgtccttgtctgaactatcctctgtggctgtttccgtcatctgtgacgagcctttagcctcgttttttgatgatttaatcacaaaaaatgtggcaactgcagccagtgcagctactattgcaacaattataaatattgctattatctttcttttatcgttcatagattttcctcttcatcaatgtatataaccatgtataagcaacctgtttctatgcaacaaaatatatcatataatccggtatttttcaaatatttctcccttttcataacttttcaaaatcctttttcagagaaaaaaatccgctatacacctatcgtatagcggattaaaaaaacattattcaattttcatattatttattgcgttaagctattgtgccatttgcaatgtcgttctttgccaataaatatgtaatagccggcataagaatggctgaaataattgctttgacaatattaccggcgctaagctgtgctgcaatagcatatgtaaccatacttacaatgaatcccagggctgctagtgcaaaaataagcaccaaaccaatctttttgtgtgcgaaaagcaaaataccgatagaaacagttatgataatctgtagtataacgctaatgaaacacagtacgacatatgtcgcacctaatcctaaagtagctcctacgactgaagcacccagcgcaacgacaatcccgccaattgttgcaagaatattcagcacgaaaataatccataaccatacggttaaacctgttgaaagcttattgttttccataattatcctcctttagtaatcccaattttttcaacatattcattataatttaccggaaaaattatttcaatagtcaaaatgcctcattttgaactcatcccgacctacaaaaaattgtaattgatttaaatgacagatgcatttacaatatagctattatgaaaaaattatttgtaaaatatgtctcacaaaacatactcggcatggttggtatgtcattatatatacttgccgacaccttctttatatcaaaggcggtcggctcaaacggtatcaccgcgctcaatctggtgctgcctgtatacaatttgatttttgccataggcgcaatgatcggagtcggctccgctatcagatatgtcgtagagaaaaataagggcgatacatccagcgagagctacttttttcatgccctgctgtggtgtgttatgataagtgttatattcatattgattggtattttcatcccggacaggctcgtagggctgctcggcggagattcggcaattataaataccggtaaaaactatacacgtattttcatgctttttacgccgtttttcatgtgcaactatgtgtgcaacgctttcgtaagaaatgatggcgcaccatccattgccatgtgcgccacacttttcagcagcctttttaatattgtttttgattacatactcatgttcccgcttggacttggtatggagggagccgctttagctaccgctatttcaccgattataggcatcctgatatgctgtattcatttctgctcagacaaatgctccgtaaagcttaagccgacggttccatctgtcaagaggctcttttactcctgccaggttggtgtttcttcctttgttgctgagatatcatcaggtgtcataactattgttttcaatatgattatcctgaggcttgcaggaaatatcggcgtggcagcatacggtgtggttgccaatacatcactggtcgctgtagctttgttcaacggaatagcacagggttcacagcctcttatcagcgactattacggcagaggacttagaaaaaatgtaggttcgatactcaggatggctgtcgtttcatctctcttaattgctgcactgctcattttgttcatatgcacctttgcaccttttgtgacatctgttttcaacagcgagcacgatgccaggcttgcttcgtatgccgagagcggactgcgcctttactttacaggctttatttttgccggaatcaatatagtaggttctgctatcctaagtgccgttgagtccgtaaaatatgcattcgcggcatctatcatgcgtggttttatcgctataagcattttcgcattcgcactttcagccgccttcggcatgacaggtgtgtggcttgcttttccggcagctgaatttgtgacgatgtttattattgttaatggattaaggcagcttaagctgtagatgcaggctataggtgtaggtgaactattttcgtgcatacttattttccatgtgatatactaatgatcaagaaaacctatcacaattatgatatatgatgaaagaggagggcttgtatatggcaaaaatagaaagagttatcaatagggattttgaccagttactttccacgattgaagacggaataataaacggcagtgtgtcagcatctctggaggatgccagtgactttcgaagccaagatgcgcgttgcagcgtcagggtatttgaacgcttcagctataccggtggtaacagggtaagtctcaatgttacactttttcaaaatggcgaggcgcctgttcacctttctgcaattacggcaggtggaagccaggctgtgtttttcaagcttaatacttttggggaagaggcatttcttgataaattgattgaattgcttgattgaatatattaatgcagaaagtcctttaaagaaagaactgtttctcaaaataggtaaatatttttcaaaagcattcgttatgttggaaatcaaacatacaagttgtttttataacgctattattctgtcagaaacataaaaaactactgatggaggaaaaaaagatgttttgttttcaatgtgaacaaacggccggatgcaccggctgtaccggaaatataggtgtctgcggaaaaaaggcagatactgcacagttacaggatgaattgacaggcgcactgattggtctggcgagagctgtcgatgacacatctgctgtttcaaaaaagacttggcagaccattatcgagggcttatttaccacaattacaaatgtaagctttgataatgcaacaattgaagatatgatacaaaaggtcagagcagaaaaagcctctctggttggcgactgtaataaatgtcagtctccttgtggacgaactgacgaatatgatatgcaacagctatggaatgctgatgaagatatccgttccctgaagtcacttattctctttggtattcgcggaatggctgcatatgcctatcatgcatatgtcctgaattttgaagatcccgaggtaaatcattttttctgtgaagccttgttcaagattggttacgcagaaagtatggatgaactgcttccaacagttctcaaggtaggtaaaatcaatctaaagtgcatggcacttctagacaaggcaaatacacaaacctatggaacaccggagccaacagatgttacgcttacggtagaaaagggaccttttatcgtagtaaccggacacgatttaaaggacctgcagcttttgcttgaacagacaaatggaaagggaatcaatatctacactcatggtgaaatgctccctacccatgcatatccactcttaaagaaattccctcacttgaagggaaatttcggaacagcatggcagaatcagcaaaaagaatttgatcatattcctgctcctattctctacaccacaaattgtctgatgcctccaaaaagcagctacatcgacagagtgttcacaacagaagtggttgccttcccgggtactgtccatatcgatgaacagaaggatttcactcctgttattgaaaaagcacttgagctcggtggttacaaggaggatcagaccttcacaggcataaatggcggcacacaggtaacaaccggttttggtcattcagcaatcctgtcccatgcggatacggtaatagaggccgtaaaatcaggagctatccgtcatttcttcctggttgccggctgtgatggtgccaaaccgggcagaaattactatacagaatttgtaaaacagacgccttctgacagtatcgtcctgactctggcatgtggaaaatttcgtttcaacgatctaaatcttggagaaattggtggtcttccgcgactgatggatatgggacagtgtaatgacgcttatggcgcgatacaggttgcaatagcacttgcggatgcatttggatgttcagtaaacgagcttccgctttcctttgtactctcctggtatgaacagaaagctgtctgcatcctcttaacactgttacatcttggtataaaaaatatccgtctcggtccttctctaccggcgttcctttctcctaacattctgaactttctggtagaaaactatgggattgcacctattaccacaccggaggaagacctcaaagtgctgttgaaacaataatatgtattttttccgatgttctaatacactaatagggaactataaaaaacacaggatatagcgcctttgctatatcctgtgttttaaattaactttaaataaatttgtaatcattagggtaatctaagctatttctccccatacatctccggccgcctgtccctgaacagtccccagctctttctctcactctccagctcatccagatcaaaactgtggagtatgaagccctccgatactctgtccatctgctcaacaacctctccggtcgcatctgtgataaacgaagaaccataaaatgtcagtgcagagctctggtttccgttttctgcacacggtacaacctcctctgtgcctatcctgtttgccgccacaaccggcatcagattgcaggctgcatgtccggtcatgcaccttctccagtgtggcatgctgtcacattccagtatcggctcgctgcctatggctgtagggtaaaaaagtatctccgcgccctttaaagccatgcctcttgccgtttccgggaaccactgatcccagcatataccgactccaattgttgcatatcttgtcttaaaagctttaaagcctgtatttcccggtgtgaagtaaaacttctcctgataataatgatcgtccgggatatgtgtctttcggtatattccaagcacctctccgtcggcatctatcaccgccactgagttgaaaagctgtctgccctctccagcctcataaaagctcacaggaatcactacgccaagctcctttgcaagtgccttcatgctctgcaccgcatcattttcagaaagcggctttgcatagtcataataatcgtaccgcctctcctgacagaaatactgtctctcaaatagctccgaaggaagtattatctgtgctccggcctctgccgcagcccttataagctttgctgctttttcaatattttcttttacgtcacggctgcagctcatctggattgcagcaattgtaacctctctcatactattcacctttctcatcccgccatctcacaatgggcttttcccaagtctccaatgtgagcaaaacgattacaaccaattaaattactgtggtatctgctgtgtgatacagtgtatatttccccctccgacaattatgtcgcgcgcatatatcggatacacttttcttccctcaaaaaggcttccgattgccttaagcgcaggctcatccatcacatcaccaaactgaggaatgagcacaccgccgtttgtgatgtaaaaattcacatagcttgccgctaagcgttctcctgcctcgcgctcatcctcaccctcctcaaaggtgaagcccgaaagctcatattctgtgatacacaccggattctttggaatgtaaaccttgtgaacctcaattttccggcctcttgcatcagtttcattttccaatatttcaaggtccgctgaggacatctgatactgtgggtcatccatgtcatcagtccacgcaagcaccacatgccccgggcttgtaaatgcacatacgttgtcgacatgctcgttggtttcatcattgtatattccataaggaatccagataattttttcggcaccgagataatcctttaatttctgttctatttcagacttcgataattccggatttctgcccttgcttagcagacagctttccgtcactatcacagttttctctccgtctgtgtggatggctccaccctctaagacaaacggatgtgcatcatacatgtcgtatccggctttgttgcaaaataaagccgctactctgtcatcctttgtccagtctgcatacagtccatctaccttgccaccccaggcattaaaacaccagtcgattcctctgacagcgccatcctcatttttcacgaaggtcggccccacatctctggcccaggcatcatctgactccatttgtatatatttcaccgggaaattttcctgataatttttctgctttctgacagcttccacaacagaccttgcattgtctatcacatctgcctcagcgagcacatatacctgctcagactctgatattgcacatatcacctccgcaaaagcctctcttgcccgcctggcaccgtaaatccatgagcccgggcgctttggccagatgatgatggtacccttgtgtggagcatactctgccggcatataaaagccgtctgctctaggacagcctgcatttaaaatcttcatattcgaatctcctgataaccttacaatcgttattttcatccattactgcaatgtccggaagcggcatgccgttaaaggtattatttttgaccatcgagtagattgccatatcgcaaaagcacagcctgtcgccggtttttatctctctgtcaaatgaataatcccctatcacatcacctgccagacaggtacatgaggacaatctgtaggtatacttcttctcacccggctcgccactgtccataagcggcggacggtacggcatctcaagcacgtccggcatatggcaggctgctgaggtatccagaatgagtatctttatgccattgttttcaactatatcaagcaccgttgtctccagatatcctgcatcaagcgcaaccgcctctcccggctccagatagatttccaggtcgtatttgtcacgcatatgcataatgcatttttcaagtctctcaatgtcatagtctgcccttgtgatgtggtgtccgcctcccatattaagccactttagaccatacagcaaatctccgaatttctcctctaccgctgcaagagtcatttcgagcgcatccgaatcctgttcacagagcgtgtgaaaatgaaagccctctatacgtgataaatcaagcccgtttttaatagccttatcgagtgcctctctcgttatcccaagccttgagcccggcgcacatgggtcatatatctcatgcccctcctgtgtggagcactcagggtttattctgagcccgacacttatttttttatcagccttttctattttatccctgtgaagcagatactgcgatacggaattaaatacaatatggtcacatatttctatcagctcatccatctcctgcggaaaaaaagcgggacagaatacatggttttcctttcccatttcttcatgtgcaaggcgggcctcaaaaagcccgcttgcagttgtcccgcttagatatctgccgataagaggatattcataaaatgcgctgaatgccttctgtgccagaagaatccttgcacctgtcctttgcatgacaccgtttaatatcaaaagattttcagttaattttccctcgtctatcacataacagggagttcttaattcatttatcttcataccggcctccggactaatccatatgtactgactcatcctcagtcttgtagcagtccacaggaaccggattctccactacctgccaaggcagtccgaacttattaagagcctccatgtatggatccggatccatctcctcgagattgaacactcccggcttcttccaaagtccctttactaccatcatggcaccaatcatcgccggcacacctgtggtataagaaatcgcctgcgactcaacctccttgtagcactcctgatggtcgcatacattatagatgtagattgatttttcctttccgtccttgacacctgtaaaaatacatccgatatttgtctttccgactgtgcgaggtcccaatgatgcagggtcaggaagcagctccttaagcacctgtattggcactatttcctttccgtccaccatgatcgggtctgttcttagcatgcctacatcctcaagacacttcatatgtgtgagatagctctgtccaaaggtcatgaagaatctgattctctttattcccggaatatttttggcgagcgactcaatctcctcgtggtgaagcagatacatatccttttctccgacctggtcaaaattgtactgcgctctccactccataggctttgtctctacccagtggccgtctgtccagtatgagccgttcgcagaaacctcacgcagatttatctcagggttaaagtttgtcgcaaatgggtatccgtgatcaccgccattgcagtcgagaatgtctatggtatgtatttcatcaaaataatgcttaagcgcatatgcagaataaacagaggtcacacccgggtcaaatccgcttccaagaatagccgtaagccctgcctccttaaatttctcctgatatgcccactgccatgaataatcgaaatatgccgtaaatccaagctccttgcagcgcttttcgtagattgctctccactttggatcctcagtatcctcacactcatagttggcagtatcgatgtagtcaacaccgcacgcaagacatgcatccatgattgtaagatcctgatacggaagcgcaacatttaaaaccgcatccggcttgtatgcattaatcagctcttttaattcctccacattgtcggcatcaacctttgcagtctcaatttttgtgcttgtctttccctcaagctttgcctttaaattgtcacattttgacttggttctgcttgcaatcataatctcggtaaatacctcgctgttctggcagcattttctgattgccacctgcgcaactccaccacatccgataataagtaatctgctcatttttgtccctcctgattcgctttggttatgatatagtttttctaatttgttttacattgtttcctcttcctcgagtaaatcctccacatatttcggaagcatgaaggctcccctgtgtaaatgtgttgtataataccaggttttaagtcccagtgcatcccatctttttgcatccagatcataaagcggatgatatttcttcgatgcaaacccaaacagccagtagcctgacggacaggttggaatatgtgcctgatataccctgcttataggaaatgatttatacacctttctgtgcattttccggcactcaagctcatcctcatcataaaaaggactgccgtgctggtaaaccatgattccatcatcctttagcgccttataacagcttccgtaaaactcttttgtgaaaagtccctccgtatgtccgagcgggtctgtggaatcgttgattatcagatcatattcatcatgctttctgcgtaaaaatcgcagaccatcatcataaaacatggaaattctttcatcctcaagtccacatgctacctccgggaaaaaccgcctgcatacatcgacaaacatcttgtctgtctcaaccacatcaatatgctcgacagacggatattttatgagttcctttgccacgccgccgtcgccgccacctattataagtatcctttttgcattcgggtggaccgccatcggcacatgtgtgaccatctcatcatatataaactcatctgtgtccgaaaaaacaatctcgccatccagtgcgaccattttgccaaactcatatgatttaaacacatctattttctgataatcactctgccctgaaaaaagctgctcctgtatccttacatccagcttgacattggcagtatgatattgtgaaaaccacatttgcatagcttttcctcctgtttactgctccaataccttaagatattctaccgcaggatcctctgttccctgcattgaacagcccttttcctttgcgtagacaatgtattgcgcaatttcttttgtgataagctctcccggtgcaagaatcgggattcccggtggataacacatgacaaactcaccacttacagcgcctaccgcgtccataatgcgcactgatttcttctgcgaataaaacgcctcctgcggcgataccgccacctttggatttatgtactctcccgacaaaagtccggtcttgtccttgctgtaaaggcgcttgatatcctccagcgcacctacaagcctctctatatcctgtattctgtcaccgattgatatatacgcaagtatattacagatatctccaaactctatctggatatcatactcatcacgcagcagatcatatacctctattccggcaagccctatatctagcgtatagatggacagctttgtcacatcataatcatatatgcttgagccgtttacaagatcacgcccatacgcataatagccacctatggaattaatctcctgccttgcgtactccgacatctgtgccaccttggcaaaggattcctcgcccctgagtgccagatttcttcttgatatatcaagacttgacaatagcagataagatgcgctcgtggtctgggtgaggttgataatctgcctcacataatcagcattcacatcccttccggtgagcagaatcgagctctgtgtcaggcttcctcccgatttgtgcattgataccgcagacatgtctgccccggctgccattcctgatatcgggagcccctttccaaaataaagatgtgtaccatgtgcctcatccgtgagcaccttgattcccttcgaatgagccagcgcaactatcgacttaaggtcagaacagattccgtaatacgtcggattgtttacaagcacagcctttgcatccggattttcctcgatagccctcgccacctggtcaatctccattccaagcgaaataccaagcttggcattcatctgcggattgacataaaccggtatcgctccgcagagcacgagtgcattaagagcgcttttatgaacatttctcggaagtataatcttgtctcctgccttgcaggtggacaaaatcatggcctgcaccgcagaggtggtgcctcctaccataagaaaagcatttgccgctccaaaggcatccgccgcaagctcctccgcctctctgattaccgaaaccggatggcacaaattgtcaagcggcttcattgaattgacatcaagtcctacacacttttctccgagaagatgcaccagctcaggatttcccctgcctctcttgtgtcccggcacgtcaaacggcacaactctcttcttcttaaactcctcaagagcctcataaatcggcgctctttcctgtcttttgatatccatttacttctcctgtatttaaaaaaggatgatgcgtgcaagcatcatcctttagattcgtcttaacaacagtaaaatcgtaacatatactatggagttatgcaagaaattacgttttatttttatataaacacttttagccttccgactataaagaggaagccggtacatgtggagtgtaccggctaaaaatatgaaaaagattaatatgagtatttcttttgtttatgatgtcagtatacaggacaattgtgaaaatgctgtgtttactttcttacccttttataaacaaaatattacattttttatatttttaacttaccattgttgtgttgttgattttggatattctgagggtgaaagtctgtcatattgtacgtgccggataacattttctactatacagccgcaattactgtttaattgtgatgggattaaacacagcactaagaattagtgacctgcttagattaaagtgggacaacgtttacaattatacctgcagataccagcctataagcaggacgcaggcatatcgtattgtaaagactgctgccggcaaaacagtgcaggatgaaagggacgagatttatctggagcttgaattatagtaccttctattccgccggccaggattttctgagagccacataggaaatcaggaaattggcaaaccagccggccggtacagcaagccagacaaatgcaataccgaaacgcggcgcacagattaaggcaaccgacaggcggattgccaggtttaccatattggcagcgagaaacggacgcatgatgccaagtccacgaagcacaccatcggtggccatcttgatacccataaaaatgaaaaagaagccaagccatctcatataatccccggatacctgatatgccagggccgttccgtctttacccaggaataatgaggaaatctgagtatgcagtgtttcaattactataaaagcaagcactgcaaaacacaggtctaacaccagcgcagcgtgatagccttttttgatacgttctgtcttctttgctccgagattctgggaaacaaacggagaaactgcatttccaatggatacaaatatcagtgaaaatacattctctaccctcatcgttgccgaatatcctgcaagcgcctgtgtaccgaacggattcacaactgcctgtactatcatcatgccaattgacaccgtagactgctggagaaccgaaggcacagcaatccgaagcattgaatgaagctcatgcctgtcaaaccattcaaagcgacttttataccggcgcatcctgctaaagaaaatcaaaagtgaaaacactgcagatattccctgagcaattagagttgcaagtgcagcaccgaacacacccagatcaaggcctgccaccatccaaagatccataaatatatttaacacagaggaaaatatcaaaagccccaacggaatccttgactcgccaatcgatgtaaacatcgttgaaagtatgttatacataaacagaaacggaaatcccacaaaataaaccctaagatacagcactgcctcatccagtatatctgcaggtgtctgtagcaagctcatcattgaatgtgaaaagaaaaagccaaagaaacccagaagtacgcttaaaaccagaaaactaatcagtgatgttgatactattgttttcattttgccgtaatccctggcgccgaaatagcggctcacaagtacaccggctcctacaccggctcccagtgctatacagatgaacacattcgtaagcgcagcacaggctccaactgccgcaagtgcagaggagcctacaaactgaccaacaatgattgaatcagccatattatatacttgttgaaaaaagctgcccaaaatcataggcattgcaaaaactgtcagcgcctttaacggggcatctgtaattaagtattcatcttttgacattatttttccctcattccgctataattaagctatagtatatccgattgaaagacaaattacaatatagcattctttatcgacatttttccatttcttatgctttccctctaatgcaaacatcatactgctcctttgtattttaatttaaaaagccgcccaggccataggcctgtgcgacttctcataacatgatttaaattaagtttatccttcaatagcaatatgctttgtggtctcaactttcttttgctccttcttcggaactgaaagtttaagaataccgtcctcatactttgccttgatatcttcctgtttcagctcatcacctacatagaaagacctgctcatagcaccggaatagcgctccttgcggatgtacttgccatccttttcttccttttcttccttgtcaagtcctttagctgcgctgatagttaagtaaccattctccagcttagcctcaatctcatccttcttgaatcccggaagatctatatctacttcgtagctattgtctgtttccttgacatcagtcttcataacgttctttgcgtgtttaccataaagtgccttgtcaacatcaggaaatgaaaaatccatccaatcatcgttaaataagttttctccaaaaatactaggcatcaacataagtcatctctccttcttaatctataaaatctgtgtcaacctgtttctttggaaccgggatgtttcaagaactcaaagcctttgctttttgttcctttcctttgttcttgactatgttatacacctattatcagcactcgtcaatagggagtgctaataatttataaaatgtttatattttccgagcagcttcaaagtacttaccatatgaaactccattattttgcaataaataacactccgagtgtgccaggcccacaatgtgatgaaatcacaccacctgctcttgtctctataatttccttaaaaatgccaagagaggctatgtaatctcttacctcttcaactgtcttagcatcacattccgaatgtgtaataaatacccgatccggtattgcgtttttcaggtcctcttccagatcttttgcataattctttatgactttaccgatcttacctctatatttcctgcttgcatccattttaccatcctttacaacaatcatgggatgaagcgccaatgctcctccgataagcgcagaaacagcattgcatctgccacctctgtaaaggtacacaagtgtatctacaacaaagcttgctcttaccttcgggatcaattcatcaattccggcttttatctcctcacgggatttaccatccgctgccataactgccgcctcaacaacaagcaggcctattcctgtggacagatttcttgaatctatcaccgtaactttatcttctgcatcaagttcttctgccgccattctgatcacgttgattgatgtcgacatctcacttgatatggaaaagcatatgatttccctgccttcatcaatatatggccgcattacattcattgctgtttctatagatggagctgaagtctttggtgtagtcttatttttatcagcccactcatacaatgcgtgaatgtctatctgcggtccatcctccagttcttcatctccttttacaatatgaagcggaataatatcgatatcgtatttctttaaaacttcctgtgacagatcacatgtactgtctgatataatttttaccattttaacacctccaggctttcaaaaatcattttgtccttcctttttgttctattatactatcttattttattatttcaattgcggcataaatatattattttcatgcccatattcaatagttacattttctttttattacagtatcaaaaaacgatattttcaccaggggggtgaaagcaacgttcattttactgttggctggctcagctggctttgtgctattgccttgtagtaaacacaaatagaaatgattgctgtaatcgcttccgtgatccaaaacgcattccagacgccaactgctccgaaaagcctgctgagaaaaaacgcagttgggatgataaccacaacataccggcaaagtgaaatcagtaatgaaggaatgccttttccaagtccctccaatgcgccggaagatgtaacggaaaccgccgagacgataaaaccggcgccgatgatacgcagggctgttttcccggtctggattgtcgcttctgtgtgggtaaacagccccataagctggccggggattagcagacatatcactgtcccaagcaccataatgataccgctcatgcacaagacgattttataaatctggctgactcttttgttctcccccgcaccgtagttatagcctatcaatgggcgcatcccctgaacaatgccattagccggaagatagatgaatgtctgcaatttgtaatagattcccaaaacaagaatatacacctcggaatatgccgccaaaatagcattgagcgccgaaatcaaaagagatgggagcgcaagattcaaggttgcgggaattccgatggagtatagctttattaccatctttttgctgagcaaaatgtactgcctgcggatatgcacgcgaattggccgcacaaaataaacgaccagataaatcgtaagcgtcaaggcctgcccgatgccggttgccagcgcggcgccttcgattcccatttcagggaatggaccatagccaaaaatcagaactgggtctaaggcaatgtttattatacacccacacatcaggctgatcatagttgtcttcatgtttcctacagcttggaatattttctcgaatgtaacaccaacaacgataatcaatgtaaaagagaacgcaataacagaatagtggacgccaagttcaatcactgtcttggatgaagtgaacattcctaaaaaagccggcatcattgtaataccgcagactgtcaaaacaacgccgtgaatcatggcaagcacaagtccctgcgtggcagcttgatctgcttttttgttatctccagcgcctagatagaaggcgatcactgcgttgattccaacgccaaatccaattccaacagcattgataaaattttgaaccgggtaaaccagtgataatgccgtcatagcttcctcgctgatctgcgcgacgaaaaagctgtcgataatgttgtatagagaattaaccagcattgataaaaccataggcatggccatggataaaatcagcggcaataccggtttttctttcataaaagtatcgttcatcatttctcctccttggaacatgttataagatatttttgtggcgataccatgccattattatgagagcaatgagcatagtggcggtttccgcaacaggaaatgcaaaccagattccgttcagttggaataatttgtccagacaccataaggccggaacaaggaaaagctgttgtctgcataattgaatcgcaatgctggaacctactttttctgtcgcctgaaaataggtggaaatcatggtagagagaccgcaaaacagatagcttgccgccataattcgcatggcggatatgccaaaggagcgcatggcttttgacgctgtaaataattccaaaagctgcgccggaaagaagttgacggtcaatgttcccagtatcatcataccggagaccaaagcggttccgtatcggaaagcggagtgcagcctatctctgtttcccgcaccgtagttaaaccgcataataggcaaacagccctgaatcaagccgtttactgtcataacgaccagctgctgcaccttaaaatacgcaccgaagaatgcaatcgccgtatcggaatacgccaccagaaacagattgacgaatgtcaccataaacgaactgagggcattcataatgaaagatggtaagccaagggcgaatatacgggcaatcatccacttttgtatatgaaattctttgatctttatccgcactttctgctttttgcccagcagcaaggcaaatgccaaaatcatggataacaaatagcccgcaacagtagccaccgcagcgccacggattcccatagctggaaaaacaccaataccaaaaattaggagtgggtcaaatacaaaattaacgaccactcctgcaatctggaaccacataggagcaatcatgttcccagtagcctgtatcatcttctggattgcgatatgcaccatgttgggaatttgcatgaacgaacatacgctcatataggcaagactcaactgataaatttcttcgttattggtgaatgccctaaagtagggtttcataatcagtaatgacagaagattgagcaaagcaccaattccaaaggccagtaacaatccatgtgtgacggtagtatttgcctcattctgctttccctgtccaagataccctgcaatcagtacattcacgccaacgccgatccagatagatgtcgcattcatcaaagttgtaatgggaaacgacagggaaaccgccgtcaaagcattttcactcagccgcgctacaaacgcgctgtctatcagattataggaatattgcagaaacatagaaatcagcggcggtatcgacatttgccagatgagttttccaactggcgcaaccgccattttgttatttgtctgcatgctttccctcttctccacaaattgtccgaacattatagtcctccattctgctaatacttccgagatacaagcaacaaaaaagccacacaactatcacaagatagctgtgtggcaaaaagatgaccgaatccggaaaagtccactaaaattttgcgtttatcattatagcgaacttgaaggagactgtcaagcagcactcattacggaactatgcagaagagagaaactatatctctctccatgcttattaatacacataaaggtacatcgaagcaaaagattgaactcttctcccaacataacatatgccgagaaaattatttcttaatattgattcatgctttggcacatagctgccttctttaaactgtaacacgtaattcggctgttccattatttggcaagcttatcgatccatgcaaacaattcttccagatcataatctccgctatgcggtaatccccacggcaatgaaaagtccacttcataacctttgttctttaacattgttgccaatattacaggaatcgcaatcaaagtatctctgtcaaaagctccatgacggattctccagttttttgtcgtatcggtcatattgacatcgatggtgatcatgctcttatcttctgttcagcgtcaacctctaaaacgcttcgcacttcttcaatcgcaaaacactgacagaatatggcggtgcctcgtatacgaactctgaggaagcgccatgcatattcacggtaatattcttcaccttctccggctcttcaaagctgttttcatcccctttttcaccgctaagaagtgttacggtatagtcgctctgtacctgacagtccagtgtaatggaaacaggatccacatctcctgcaaaattaaccgccttaataatgatttcgtccttggtgtcagttactaccgaaacaaaagcaggtccgtagggaatcgaaatttccttctgaagctcaccatcaacatacaggcgaatctgttttccgtccgtttcatatccaaagcggtgatattctcccggttttactgaaatagcaaagtcctcagtcagcttgttgtcatgcataaagccaaactcttccagtgaacattgtcctccattaaccttccaaaggaacggacgcaccagagctgcatcccattctttttccactccggccgtaatcacgatctgctcctcataataggaacgaaccaccctggcactgaatatacccaactcgaagtaagcattttcctcaacaaaaatatcggtctcaaatcttccataagtctggtcttcttctccaaataccacaaagctcttggtctcatcagcccattccagaatactgtgaaattcctttttctgctcctcatccggaagctgaagcaggcggccatcctctgtatcctgcacatgtcccattaattcatgagtaatctttgcttcttctccattccaaatgggatttctgaagcgaagttccttattggattttaaagatgccattccggttctaagacgataaacacgtcctccctcatcttcggatcgcaccacatattctccgcgattttcaccgaacattttccagacataataagtaggaattccaaggctctgatgattattgaaacgaatcagattaggataccacgctctgtaatttacattttcaaataatggagcataagaggccaatgttacgatatcctgatttttctcaatacccataaggaaagccgcttctcccaaagccgcatacaactgtcccatatagttgccttcgtttacagccacctctcctacaaagatttttggtcccttacgatcgtagtcatcataataatttacacgttctgcaaagaactctgttgtattgtaaaaatgttcatccacgcactcggcaggacaaccatttttctctacatgctcattggctatggttttaatctggggatacagttcctttaccttcttataaatcatgttgtatcgcttttcataatccggaccccagttttcattaccaatttccatgagataatcgagaattctcgattatctcatttatccaaaccttaatattatctaaactttgtttcaaaaacgacattaattatagcgacattaagtctaaaggtttggattttattttccatggtatgataaaccaaaagaaaaaaggaggttaacataccatggatttaacaaatttacgacaacaccatgaagaacttgtcaaccatatgaagaactctggatattccatgagttgcatctatatgtacaagcgccaaatccgtgaaattcttgatttggatttggaatcatggacttcgtatcaggacatttaccaatattttgtgagcatctcctcaaatcaaaaagacctaaagtggagacgctcagtaattggcagcattgaatattttgatatttatggtctgtttccggacagacgcagaatttgctcttttattgaaccaagaggtgcatatcactctctgaatcatgtttatcaacaactaatagattactacaagacctatgctgagagaattggtaaaacaaaagacacaacaatagacagcgaaagtcatagtggttctgtgttcttttatcatttacagcaaagaggctgttgtaatctggaatcaacggaagaagatgatgttttgtcttacttccttgatgaatcgggtaatttaatccgctccgccgcttgttgtaaaagtgttagagcagttctaaaagcaggctcagaggttgatcccattggttgtaaaaaagtattactttttctgccacatctgacagaacatcgaaaaaatatccaaatgctcacagatgatgaaatctgtaaaatcaatcaattattggatacagatacactgtcactgcgggataaagccattataaatcttttgttgcacaccggaataagaggagtagatatcatcaatttaaagttacagtcgattgactggaattctgatgttatccgacttattcaatcaaagacgaagaaagaacttgaactgccactgttaccatctgtaggaaatgctttatatgactatatcactatagagagacctaagtgttcattcgatgctgtatttatctcagcagttgtaccatatgaaccactgaaagtacaaacaatacgttggattgttcgtaaggtgtttggtcttgccaatatccgcatgaataaaggtgataggataggcactcatttattccgccatcatctgactgttaaactgttagaaaaagatactgctttaccagtcatatcaaatatccttggacacacttcaccgaagtcagtagacccatatctgcatacggattttcatcatttgaaagaatgtgccctaagcatagaatcttatcctgtgcgaaagggggtgtttgatattgactgagtttatatcaaaactctctccgcttatggagcagtttaaaaaatatcgaaaagcttctcaaaagtggagcagagattctcattacaaaatgcgtgcatttgatcgtcactgcaatgaattatatccggaaaatgataaactcacccaggaaatggttgacagcttttttgtgaaaagacctactgaaaccataaactcttgccggcaacgctgctacctggtttctgaatttatcaaatatcttcaggaaagagaacagacaaatgttattgttcctgaaagaccccgtaaaagaagaaacacgtatataccacatgcattttcgcatgaggaattatctgatttcttcgaagcctgcgataatctgagatatttaccaaaccggattgatatgaaaatacgcagcatgacagctcctgtgatttttcggttactttatagcacaggaatgagaacaatcgaagccctgtctttaaggtgtgaacatgttgatctcactgaaggagttatcagtatagtaggcacaaaaggatacaatgagcactatattgtattgcatgattccatgctggaacttatgcagcaattcaatcagaaaatggattgtatttttccagacagagaatactttttcgtgtcaagagataatgtccgctttaacagcagctggttaagtgctaattttcgtattatatgggattctgttaacagttcccatgcaactgcctatgatttacgacataactatgcaatagaaaatatcaacagatggaccaatgaagggttcaatttctatgataaaatcgcatatttaagtaagagtatggggcatgtcacattagaaagtacaaaatactattactcaattgttcctaatctaagcagtattatgatgaatcaaacaaacgaaacttttgattggattgtcccggaggtaaatacagatgaagaaatctactaaccaaggcgtatgcatcgcccgtcacatatcgttctttgtgaacgattatgtgtcatcctttttaacagagagcgaacacacaattaaagcctatagatacacacttaccctttacatcatgtacttagatgagaaaaggggaatcactatcaatagtttaagctcagactgttttagcagatcagtcatagaagaatggattctatggttaaaaaatgaccgtaactgctgtgctgcaacctgcaataaccgcctcgcatgtttgcgggtattcctaaaatatcttggaagtaaagaaatcgattatctatatttataccatgatgcgacgttaattccacgattaaaggaaccaaaaaccaaggtaaaaggcatgagcaaaaatgctgtcaaagccttgatgtcagtacctgatgttaccaataaaacaggcagaagggatcttgcacttattatcctgctttatgcgactgcctgtagaatagatgaagttctgtcgctaaaaaacaagcagctgtatctggatgctgagaagccatatatcactatcattggcaaaggaacaaagattagaacgataggacttttacccaaggctgtagcacatcttaaaaagtatttagcagagtttcatggttctgctcctgatcctgaagcctacgtgttctattccagaaatacaggaatatatggaaagctcacacaaccggctattggtaagatgcttaaaaagcatgccgcatgtgcacatgaaatctgtgatgaggttccgaagaatcttcatgcgcatcagatacgacatgctaaagcatcacattggcttgaagatggtatgaacatagttcaaatatcactcctgcttgggcatgagcatctacagaccacaatggtgtatctggatatcacaaatgacgaaaaagcagctgcattagcaaccctggatgatgaaacctgcaaaaaggtaacaccaaagtggaaaaacacagatggttcgcttcttaatctttgtggtttaagctaatcatcatcatttaaaatccaaaccttttattagcaatcaactgatttgttctgccattattacaaaggtttggattttattttggtttggataaagataggtcattttaaagggttccggatgccccatagaagcacgaagccttccccatttgctttccttagagccgatagcatattcaatggcatccagtgtatcctgtaccatttcatcaagagcctctccttccagaaggacactctttcttccctgacaggtcattccgcagttacatacatacatgggctccatccccagatcctcgcaaagctgcagatattcatgaaagccaagtcctaatgtacttctgtaatgccataaaaacagcttactgggtctttcccatgccggacctaccgtatcccgaaatctcatcgctgtggatggtgtcgttccttccacaatacagcctccgggaaaacgcataaactttggactcattcccttaagcttttctacaagatctgttctgagtccatgccccatgtaggtattgtcaggcattagtgaaataaatcccagcagaatctctccgccttctttgcaggaaatagtaagctgtgcctcgtgacaatcctcagctgctgtcagcttcatgtcatatcttgtatactcctgaccggaaaccaccagactgtttccagtcagtacttttccctggtattcgatctctacgtccagtcctatttcttcctttgcttttgcaaataaatacaaagagtaactttctccagcctttacggatataccgcaataaccggtattagtcagagacccgtccttttcaaactgtatacgcagagctgcgtcccgatgttcattcagggtatccgtcagttccagttccatctttgcattgtgtgtataccatgccggtatttctgtctccgaaatattgttgccctttacccagcggcataagccttctccgttgcaaaactcatccagccatccggatacggtttttacatggatgccatcctcctgctgtatataaccctccggtaaaacggaatcttcgaagcttctgtttcgaagcatttccggataaagtcctccgtctccggcacggttaatgtcttcaaaaaagattccgtataaatccctggctgtctcaaatcgtctttcctttgttttaatctttaacttgctcattgtaggctccttttttacattccaagagttttgatcactgcctgtatatgcaataacatagattatgataactcaaatgatcttaatgcagcatttccgttaccgcgataggtcaggtaaagcgcctgtattccatccggaatcgtaaccggtgcggtatacttttcccagacattggtatattgaacctctaatgtcgccagtacctctccatcccatgctgtctttacttcaaaagtgccatctgcatagccccggatccaaatactgatttcacgaatatcatggcagtcaaaatatttgaagccgatggtagttgaatctgtaatattggcaatatatccaacttcttcgtctccatccctgccgtcctgcattactcgtggaaaattcccttcgcccacataaactgatggtgtatcggtaaacagattacatgcaagataagcagggtattcgcctttaccctcaagcggacctccatttaaaccgcaggaggtaatttttacctgtggaatactgccgtccggcataatctgcagcttttcagcacatccctgtctgctgtaccaggtattattggtatgcctgtgataaaaaatgtaccaatcctctccgatctgcacaatacttccgtgattattggcaccgtaagctgttggcatatctgccggcttgtaggtatcgatgtgcagatcacaattgctgacaataactccgccatagacaaagtccctggtaggattcttgctggtggcataacataattcgtgcattaatatggatgaatagacaaaataataggtgtcacctactttacggatggaaggtgcctcaaaaaactcatgtccctcaaatccggtaccggcaccatattcacagccgggggccacaaacaccggagcttccctgatcgtcagcatatctgctcccaacaccgtagccatggctccggtacgggatttatcaccttttccgcaaaatccggtataaagatatgtcacatctccttccgtcagaacccccgggtcaaactggggctcatcacctttcttttcgcccagacgtgtgccatcttcataatgaacatagccataaaattcatactttcctgccggagtatcacatacagcaactgaaactaccgaaaccttgtccaacacgtaataaagatagtaccttccgtccggtcccaccgtaacatccggggcatacagacacattttgccttccgggttcagcggatcggctgtcttcggataaatcacaccctcatatctccagttgcccaagtcatcgaccggagctgaccagcacacatagtctcccatgcagaaaacatatccgttaaagtaatcatgggatccgtaaacatatacgcgatcgccaaaaacataaggttctccgtccggaatatactcccaggacggtaaatatgggttaaacgcttgttttttcactttgatatcctcctttgcaagcctaatccatgtacattgtttcataaagcaaattaccgggtgctagtttaagccttcaagctgaccacacgatcatagtcatatcctcgatccggattcacttcctttatggcatcaaaggttctatggaacagcttaaaatattcctgcatatccgcattttcccagaagccgcaaagattgggctcgttccatacttcaatgggccattgaataacttcctcttctaaatcatgttcctatgcagtcacgcatcagatgtctgaccgctgcacgatccgcagctctgtgatgacgattaccatattaatctgatactatcacattgatttaaagtttccaatgatttatactataagaaaattgatatatcctctgatgtatcagagcggagattccagatgactgaaattgaatttgtcggctacagtgccgttcacccctcagattttatatatgatattccgaatggctttacaggctatcttctgcttcttttcgactctccctcggagctgctcatagacggaagactaatgcggacagccgccaattctgctattctgtatacaccaggaagcaggatttattaccgtgctgccggtgaagaataccggaatgactggattcgttttcgttccgatcactccttcgtgaagctgtttccgttaacaaacaccccatttcccgtaacagatccggaatactgtcatcagctttttaaattactaacctgggagtccgcctttttctcctctgaaagcgaagcaaacattactcacctgctgcgggttctgttctccaaattaagagaaggaatccagaatgagtccccgggtattcacgatcatgagctggttgcattgcataagatgatctacaataatcctcagcttccatggaatataaacatgatggctgcgaagcttcacttaagtcccagtcatcttcagactctctatcaccgcaaatttggctcctcctgcatggacaatgtcatcgaaggacgtctgcgccgtgcacaggatttattagagtacagcgaatactccatccgcgacatttccgagcaatgtggttataataatgtagagcatttctgcagacagttccgtcagcataacggctgtacccctggacaataccggaaaaatgcatcagcgggaagcaacaaaagacttctcacccacaataccctgggaggaagggagtttgagaagattaatcgaaatcatccagttgcggaatcttttccgtaagttttcctccaccggcatacattcttccaagaccgcataaaattttatcagaacatgtataaattcttttttttcccattgcaaatcctccattttcctgtatgatagagatagattaacagtaaggaggcatacagttatgttgcagattaaaaatccggttttgccgggatttaatgcagatccatccattatccgtgtggatgatacatattacattgcgaactccacgtttgagtggtttccgggagttcgtctgcacgagtcaaaagatttagtacattggaatcttcttccatccgcattgtccacgacgacattgcttgatatgaaaggaaatccgtcatcgggaggtatctgggcgccggatctttcctatgcagatggaaaattctggctgatttatacggatgtaaaagtaaccgaaggaccgttcaaagatatgatcaattatctgacaacggcagaagatatccgcggaccatggtcggatccgatccgtgtcaatggtgtgggatttgacgcatcgttgttccatgatgatgacggacgcaaataccttgttcagcagacatgggatcatcgcgaataccaccatgcttttgacggtattacagtgacagaatttgacacagagacaatgaaattaaaaccggagacagcacgtacgatctacgccggaacggacgtcaaactggttgagggaccacatttgtataagatcaacggatattattatctgtttgctgcacagggtggaaccgtttggacacatcaggaagtagtagctcgttcaaagacgttagatgcgttgagttttgagacagagcctggcgatccgtttattacaaactttgatacgccggaacttgagatccagaagcagggacatggtgctctcgtagagactcccggcggtgagtggtattatgcaagtttgtgtggaagaccgtggcaccacgaaaatgaaagttcgatcgacccacgcggctggtgtccgcttggccgtgagacggcaattcagaaagtatactgggatgaagaaggctggcctcgtatcgagggcggacatggcggaaaagtgcttgtggatgcgccgaaagatgcaatcttgacagaagcaccggcagatcattcgatgcatgatgaatttgacacaccaaaacttcatgatgagtggaataccctccgcgtaccatttaccgaggaaatgggtacgacaggggatggcaggctgacattggtcggaaaaggatccctctgcaataaacatgagctttcgttggtggcaaaacgctggcaggcatttaactttgatgccgaagtgaaagtgaaatttgatccgttcaactatcagcagatggctggattgacaaatttttacaatgataagcactggtcattcgctttcgttacatggaatgagaaaaatggccgcgtgatcgaagtggcagagtgcaatcgtggcggatatcgttcgttccttcgcgacgatgcgattccggtaccggatgatgttgaatttgtatggcttcgcacaaaagtaagaaagcagtcttacagctacgagtattcctttgacggaaagaactatacagaaattccgggcacactggatgccgctgtattgtccgatgattacgtactccagtcatacggtggattcttcaccggagcatttgtcggcatggcatgcgtggactactccggatacgatcagacagcagaattccgcagttttgactataaagaactggattaatcaatagcaagagccttttttaaaccaggctcaatcagatggctggcgatgccgcagcggattccgggaaaaaggacgaaaagtccgggaaccaggaagacgatgaggcaggcgccggccattgtaaataataagatgaaagtttctttgatgtaacttgccatcaggcgcactgagagcagaagaactgccggaaatgaagtgcgcagatgtgagcggaagtttgtgtgtgaccgcgcgagatacaatgataaagcgccgtcaaagaagcccctgaagtgtatggtatagtcattttgaaaacgctgaatttctgttatcataccatgaaatggataaattagaagagaaaaccttattctttgtattttcgtataataatcatataacttataaacaataaaacagctgcgctggtccaggcacaaatttccgcataaaaaattccgtcttcaccgatcagttttggtaacaataatgcaacactgacacgcatcacaaattctgcaatgccactggcgaggggaatcagggtattacccagaccctgaatcgccgaacgatatacatacagcagatacagtacccatagaaaaattgccataataaacaaatatttatatgcaatgtctaacacctgtcggatctgttccggttcgccggatacaaacagtgacaatatattgcgtccgaataacaccatcacacctgagatcacaacagcagtaagcaatgccatataagttccgctatgcacacctttccggattctctgatatttctttgcaccaagattctggcctacataggttgtaattgcatatccgtatgaaacggcagccatctctaaaactccatataatttgtttgatgctgtaaatccagccacaaacaggaatccaaatccattgactacatactgtactgtaagcccccctacagagatgatcacattctggattgcaagaggagtcgccactttcaaaagccgcagactcattgccggctgtctgtagaagtcctgtttttccagtcggatatccggaattttccgtaacaccatcagacaatacagggctgaaaatccctgtgcgatgactgtcgccactgctgctccggctacaccccagccaaaaactgccacaaataacaggtccagtcccacattgatcaacgctgctacggtcattgctatcagtggagatctgctgttacccagtgctcgaagaatcgctgcaaatatattataagccgctatgatcggaattccggcaaatatcagccgaagatacagcattgtcaggtcaatgacattatccggtgtctgtaaaaacaaaagaacatgataaactgccccttcacttaccgcaagtacaatcacagaaagcagtgctgtcatgatatagcttttcgccaccgcgcatttcagattttctttttcccttgctccataaaactgagctaccagaatagaaaaaccctgtgtgatacctgtcatgataccgaacaccagccataccagccagtctccggcgcctactgccgccagtgcttcaacccctaccacctgtccgacgatcatggtatctgccatcgtataaaactgctgaaagatatttccaagcatcagtggtatggcaaaagtaatgatcagttttccaggtgatccagtggtcatatttttttcatttgttcccataagaatctcctttttcttttcatccttgtccgattattttacataggactctgccaaaacgcaatcctctattttcacaaagttttcccgatatttttggtagctattatatcctttttcccggcgtttttcagcacttctttctcaaagggaaagttggcaaacttaaatacattaagccctgtttcttcatcataaactctgtcaacttttccatcaatgaccgtaattaccatctcacaggttgcactcacgacagctctgttcagatgccctccaaacgcttcacctttctcatttccgacactcatatgaagatgcgcataatattctccatccattgtattgatcgtacctgtcagtgatgtaatttcataataccctttaaaactgtttgagtaatatttcttctcatctatcttatatactccgattgtgaaatcattgatagctccaagagcattgatactggcaagctttatattctcatttatagcaattgctttcagttgctctaaaatctcctcccctttgtcaattctcgctattattacattatcaaattttctgtattccattttgtttctcccatctgttagtatcttattactgcctgtattttttttatttttttcaagaaattccgatttctatttttgtttccatagcatggtgtactctttttcaccagtagcttcatccaacccttcacattgaataatgaacccttctctttggtaaaaagaaattgctctggcattcttctggtatacatttaatcgtaagctgacttttttgtccttaatataatccaataaaagtttacctatgccacatgactgcatttcatcagagacaaaaataccttcgatatattcatcatttagtcctacaaatccttgtatcattttatccgcttcaaacacatagacttcggattgtggcatcatttctttcactaattcataattacttttccagtattgatttgaaataaaataatgtgctttcagatttgtctttaaccatatgtcagcaactctatcgatatctccgttcagcaactttctaatcataacaaatattctccataactacatcctttatgcttttctctttttccattctatcacaagctcaccattaatcatcaattttttgatatttttccttccaccactgtaaaacagcctctgaacatttcgttatacagagggatacaaataagagcaagatccacccaggtttaacagtattgccgtttggcatcctgttcatctatgggatttatcttgatgggaatctcccgtctcccttaattaaagatattgttgggtaaaaaagaaaggtcagtcgattttgccgatgaagcggtagtagatttctacttcctgctcacggcttccgtcctcgcccttgacagcttcgtggacggttattttttcaattagagtgttcagaagttcggcggtcagctccacagggttgacatactgtttcatcagggcaatccacttttcagcatccgctgcggtctgtacggcggcttccatcgtttcgtgaagctgtcttatttttgtttcaagctccttttgctcgttctggtacttctcggacagcatattgaagttatactcggttatgcgtccggcagaccagtcctcatacattttagcaaacagcccgtcaacctcggctttacgcttctctgcctttttcagctccgcagcctgctttttcttcgcagagtttctttccctgtcgctggcattgagcaggcgtttcagcagcttgtcctcgtctttctgtgccagcatagaccagtattgcagtcttgcaagcacataggcatacagtacatcatagcggatatagtgcatggaacactggcgtaatccctgcccgttcttgctgcaatggtagtacccgtatgggttcttattctgcttgttttccccataggctaaagaccatccgcagtctgcacattttatcaatcctgcgaaaatctgtgtcgtaccgtttctgcgtttcctgcgtctgcttgcaatcagctcctgaactttttggaacacttcttcagaaatgatggcttcgtgggtattttccacacgataccattcttcctgcggcttccgcacctttttcttgttcttgaatgaaatgttgctctgcttgttgtgaatgctgtgaccgatgtaggtttcctctttcaaaatgctcttgacctgtgctatcgtccacgcataggctttttctgcgggcgcaccggcgtagatattggcgaaagtcccgtatctttcatagttcagccagccgggggtaggtactttttcctccaccagaatccgtgtaatgctggcggctccacgcccgtgtacagcaaggtcaaaaatcttctctacaatccagcgtgtttccgggtcgatcagaagatgaccttttttgtccgggtcttttacatagcccagcggtgcataggctccatagtgtgcgccattggcaaatcttgtgtgcatggcagccttgacctttttgctggtctgtcgggcgtgcatttcattcaggatgtttaagaacggtgcaagctcgctttctccgttgatggtgtccacattgtcattgatggcaatgtagcgtactcccttgctggggaaatagatttccgtgtactgaccggtcaggatatagtttcttcccagacgggataagtcctttgtgacaacgcagttgattttcccgtcttcgatgtcatcaatcatcctttggaaacttggacgctcgaaatttgtcccactccatccgtcgtcaatgtactcgtctacaacggtcagcccatgctctgcggcatactgtctaagcatcatgcgctgggtctggatactgccgctttccccctgtaattcatcgtcacggctcaatctcaaatatagtgcagtgttataaatcgttgtattgtatggttgtttcacggttaaaaatcctccttctaaaagaaacaacccacgcttatacaatactcgctggtacaagtatatcataagcgtgggctgattgacagtcgttattccgtattttttcaggaagcggcggcagcgtgctggatcacatcttccagcaggctgtcaagcggcttcccatcctgtgcgaaatgctccgataccttgatacggactttccccatgacaaaatactgggtgccgtctttttcggtaagcagggtgccgctgtttttgttattgctctcgtttttgctttttgccataggcagttacctccataaatgaaatatgcccgacaagggaatgtcagacaggtgtacagccgcagactgtctccgtgtcaaccaaaccgtgtcaaccggcagaaaagactttgaaaacaatccataggcgctctatgattactttttactttttctttgatttcttggttgacatggttgacaaaggagagaaatgccccaaatatcaggcttttccccgtcaaccggctgtcaaccaaagcgtcaaccaaactgtcaaccggtggcttttcagaatggaagttccatttgccgggcttcttcttccgtgatttcctgaaaaccgtccccctccggcggagcttggttgacacgctcccagcctttttgagaaccgtatttcttataccgcttcgggcttttgtaggctacccagccctgtatgatgccgcccgcaatgccggtattcataatctcgcagattgcccgtgtctcccagtctgccggggaatttaagttccccagcgcttcctcataaagctgcttggaacataccctgtcgccggtgtagtcctccaaataggcgtagatcatgccggcctgtgtgtcttcctgcataaagtcctgctggtgggcgttcaggtatcggttcatttccatgctgaatgacagcttatacttcccactgcgataaaccgtcatggcttccgcccacatctgttcgatatacgccctcgccgccgcttcatcgtccagtatgtgaacctccgcccgttccgggtacaccgtcacggggagaaagcgccggttgccggtgcgatcacggggcaaaaagtcctgccggttggtcgtccctccaaatacacattgccgcagccggtctgccggatgtgtctcatacggcactttgtaggtttctttctggcggcttaagaatgacttgatttcctcaatactcttggcgttggctgtggcaatcatctccgacatctcgataatccaatgcccttgcagcttgcggtacacattttcatcgtccagctttttcaaatcgtctgaaaaccattcgtccctgcctgccagcagccggaaaaaggtagatttcccggctccctgaccaccaaccagacagagcatgacctcaaacttgctccccggtctgaatacccgccggatggctcccatcaggaacagtttcaaggcttcataggtgtattcgtccgtatcggctcccagaaagtgatgcagggcgtaacggatgcgctctgtgccgtcccattgcaggctgttcaggtaatccctgactggatggtagcggttttcattggcaacaatcttgatggcgctctgcacctttttctcgctggtaagcccgtaattttcttccagatacaaaagcaggtagttcatgtccatgtcggtcagcgtggtactggtgcgctcccagcccagcggcttcacaatgtcaatctgctccgtcaaaaggttcaggcgcagcgccccgcgaaacagagggtcacgctggaacaccgtcaggcagtttcggatgctgttcttcacgccgcctttctgcgtcccctctaatgtttcccggatttctgccggtgtctgcgccggttccattgtgtccatcgtccttttgaccacttcctgcgtttccggcggcaagctctgaaattcgctgttcaagccgcagcacctcctttccctgtgcggcgatcaatgccgctttttcttctatttctccgtataacaaaatatccaaaaggtattctgtgtagcttatcctctgcaacgcttccacaaaaagaggatgccagatggcatcctgcggctgtggggcgtgtgctgttttccaatgctccagcaggcgcagataatcgcatagcacccggaaacaataccgttccgtttcctgaaatctctgctccgctgatttttgtcggggctgtgacctgttgtgacgcttcctatctggcggcgcattgccggatttctcataggaaacgccgaagtcctccgcaagcctgaccgcagcttcccgtttccccaatccatgcagcaaagcggccaagtcgatcacatccccggaagccccgcagccgaagcagtaaaagcggctgtccactttcatgctgggcgtgcggtcattgtggaatggacagcagaccatgccgtttctccccacccggattccatagaatgaagcagcctgccgggtggtaacagactgtttcaccgcttcaaatacattcaaatgctccctccataaaaatactggtagcggtaaagctgccggttatatcatagctccatctcatgtttctttctctgtacttcctgtggctgctccctccggcgcagtgcggtatctacggcgttctgcacctgccgcagccgtatgacttcctcccggagtggcttgtgctgcggagacagttcggcatactctgtttttaactgtgcatattcctgtttccatgctttcagggcaatggattttccgtccagttcttctttcagaatacggcgggcggcataaaacagccgtaactccgcatcgtgggatgtttcaaatttctccctctgtttcttaaacttgatattgttcaattccgtatgaacaggttttagccgctggtaattctcgccctcccgtatcaattcctgcaattcctttatcctggcggatttctttttcatggagccgcttaatgcttcaaattcttcactgacagaggaaagacgctcctgcaaatcctctaatgtgagcagcttgttttccgtcagataattgacggcttcggcaaactgctttaagtttccggttctggctttattgctccatgcccctgcgttgcgctggttgtaataagcgatcaacaggtcggcaaggctcggtgtctgcggtttggaaagttcttcttttacctctgccatccagacaaacagggctttgatcttcttcctcacatcctgcatgagccggttggtggctttaatccagcggttcagttcccctttctcggtgcggatgccctttgcttccatctgccggacattagctccctcgtggacagtaggtatcaggtcaagcccctgccgcacataggaacggtggtcgatacgcacatccagccctttttcctcaaattttgtattaacggcagccgcccactgctcccgccagtgttccagcgtttccggctcatgccagtctgttgtatggacagcgttaaacatataatcgccgtttttatcccggattcggtttccatcttcatcaagaagatattcccgacgctgtttttgtccccatgtgccatccgggttcaaagggcgcatggttgtcatcacatgaaaatgcgggttagggatgccgccgtcctctttctccgggctgtgaaaagcaaggtcggcaatcatgccttttgtcacaaactgctcctgtacgaacttcctcgccagctccatgttttcttccagcgtcaattcattctgcatggcaatatcaaaggaataggcaagctgtgcttttggatgtttctcgcagttctccacagcattccagagggtcgcccggtcaagatatatttccggcgcatggggcggcagcatgatttccgaagcgatcacgccgccctttttggtgtagtcgctgacttctccatagtagctgctgtaaagacgctccccggctcgataggctgcgctggcaatggcgctctgaccggcgctgcgcttgatctgtgcgattgaaaaatgataaagtgctatccttagtcaccgcctttctcctgcccggaaatacgggcgtggttctctgtggcagaccggatgaaatgctccgcctgcggcagattcaaaatgctttccatgagggaataaaattccgcttcggatagctcctttgtctgtggtgcaatgctctcaatagctgccccacgggtaatcagccggtgcgtcctctgtttccgggaaccgctttccagatacgcctgccggtttttcaaacgctgcattttccgtttttcctgttccagcaggacagtggttttttcatattcctgcttcaactgttccaaagatttttccatgttctcacatcctttgctgataagataaagaaagaccatccgcagacagtccgtgtgtcagtgcttctataaaacccgatgaaaagggaaaaccgcagagcggatttctctttgcggcgggtacacaggggatagccgctttagcggcgcaagggggtgtagccaccttgtcggagcgaagcgaacgcagacctcggattgctgattttatcagcggcagaggtaagctccgcaggacgcacgatacatggtctttagactatgtatagaagtgcgcccttagttcctaagggattttgccgtttccggcagtcttgtcctttttcttggaacgcttggaaagatacttcgggcagtcaaccacaaccgcccggaagctctgtttacattcgtgctggcatttccggcacagttcgttgtaagtgatacggctgcggtcatttaagaagaaagaccattccaaccgccgcttgttactcattcttgccataaccggctcctttctccgtttctatctgatgtacgcagataggctgttttgatgtagcgtctcggtatcatttttaagtttttttccctctgtatgcccctttggaaagtgcggcagtattgcaagtcagggaatgatacctcacgcttatttgtcgcttcccggtacggtttcggagccttttgccatccattcaaagaaagcaattttgctgaccttgataagtctgcccctgcggaacgctggaaagccgggtgtgtgtaccagctcataggcgctcgctcttgaaattcccataatccgctgaatgtccgccacatccagaaccagcggtaaatcctcgtagctgttcaatctctttttatcgttcattctgttcctcccataaatcaaataggttaaaatgcttcctgttgccgttctccccaaaagccgttttcctgccccattcctgcggtgtttccctgcattggtgcgccgaatgcgtcacttctcctgccggtcatatcccttttggacggtcattcacttgtcaaggtactgtgcggtacgaaattaccaaccgcaatcatcatagcgtactatccttgacaaaacaatgattctgcgataccatgagtgtaacggatataactgaattatataattaccataaacaaaggcaggggatagggatggagaatcagtttatacggcatgagccatgttttgagaggattttgtttgtcctgacgctggacaggaagaaaatgaaagagcggattttgattggggaagaacagcagatccgcttccgtctgaacgggagccaaaacgcagaggtgctttgtgatatgacacgcccactgggaacttttttgataaactttgagcgtgacacggacagagactggaacttatacgggctttctccgctgcggcaagctctccactccaaccgatggaaacagccggagctggagcaggcggcaagcgaatttctttgggagaaatatcttagcaacgaccctctgaaaatgtatgtggcgttccgtatctggaacagctatctgcttgccagagaaccccgtgaccgtaacgctgcctgtgaccgcttcatggataaaatgagcagactgaccggggtattccaaaacgaaaccatgagctttgacagggagacaggaaaaccgaaacaatttcaagctggcagcctttatttcaaaggcgcaccgtcagaagatacccggcttgacctctggttcccggacaaccggcgcacagaagaatgtgtgtctgcctatgcgtccctctacccgttgattacctattatctgaacaggctgaatgactgggggctttgcttccggcggtgcaaggtctgtggaaaatattttctggcaaagagccagcggtatgagctgtgcagcgacaagtgccgaaaagcacaggcgcttcaaaacaagcgggaatttgacgagaggtcaagagaaaataactatgacctgctttataaaaatgaatgccagaactggcgcaacaaaataaaccgggtaaaaaataccgcaggctttccggctgaccgtctggaaaaaatacaggcttccttttccgactttaggaaagaagccttacagagaaaaaaggctgtaaaaacaggaacggccagcccgaaagaatttacggactggctgtatcagcagagtaatgtaattgttgagctgaccgagatatgaaaaactttctatcgtcaatttcgcattattgcaataacagattgcttcttccatgaatggtaatattatcatcaaacttttggaagaactataaatgtccgaggtgcctttgatttcgacaaaaaaacaggctgaattgttacaaagctcggacatttcaaaaattttttgagaaatggcgaaaaaagcggggcagcacacgccgccccgccgatcccatacggttattccatcgcccgcatttgctcaatcagggattgttttttctgtctgcggattgtccatacagataagatcagctccattccgaacaataccagaatgaacagacccatttccaaaaccgggaatttgtaaggcactacttttccggcaaaagcgcctacactaaatttgctacaagcaaagatggaagccggaagcccaacgatcagcgtcgccaatgttgcaaagaacgcatagcacagcccctcgcagatattcattttacatagctgcttttgggtcagaccgatggaacgcaaaacactgttttcctgttttctggacatttgattagagagggtcgtgttaatcaggttgataacgccaaagaggaataccagccatgaaagtacctccatactgccaaatacaaaagaatttatatttttttcatactcaattatagtgtcaatattttctaacgcaatatcagtatgagtggctacaatatttttcaattcagactctacattgtccgcttttttcggatcacttgcaatgttccatgaatagtcaaacgaagctatttctggatgtaattcatggaataatgcttccgttgcaaattcaagtggagagtcaactgggactgttccatgtccatcagttggtatgctatcgttgtcaaacacccctgatatagtaacaggaatagttgatttcccagaggtaacttcaaccgtttctcccactcttatattatcacgattacttgtatgcgaatcaattatgatgctgtgtgcatccgctggcatagttccctctatcaatgcagcttcaaccgcagaataattttgttcagttagtatatcacaccaaccagcctcatcaattccgttggcacgataatttatatgaaggctttgcctttttgtaatcacatcggttacaccatcaatggccaaaatttcctgcttcaatttctcattcaatggatttcccgctgccatagcttcttctactgccaactcggaatgtaaataaattttatagtcaccatacggataaatctgccttgcaagtgcctctggggagcgcagcaaaaccatggaggataccacaagcaggataattccgcccaaactcaaagacgctataatagagattgtctttttgcggtcacgcttaaaattcgcaattcccattgaaacaggattgagcttgatattctttttccggctgcggatgtccttttgcaccggggtaaaacggacggcttcaatgggggaaatccctgccgcgattttcaccggcttacggatggaaatagacaccatgatccaactgcttatgagtgtcagggaaaccataacgacataggaaacagcgttaaatcccttggaaaacagaagaaaaccgcagcatacgcccagcactgtaccaaccaaaattccgatactgccgagtttgcgtccctcccgctttacaatccgcttgatttgctttggcgttgcaccaatcgtccgaagctgtccgtagctcctgattttgtcattgatggagatacggaagatactctgaatcacaatatagccgccgatcagaacaataacaatcacaccaacaatcggtaaaaaatcaaaggatttagaagcataagcaaaatacttgttgttcatgctgggattaggaagctgatattcctctgcaatctccctgcaataagaggttatcagttcctcgaccaactggtcgctgtttttgaaatggacataggcgcgatacccagccggatcaaaccctttccattctgtcagggcagctttggaaagaatgatagcgcaggtattcgcttctttttcatttacgctgtccataatgccggtaacgacataatcaccatgaaaactctcggtatctaaggtcacactgtccccgatcttggcattgtttccataagtggaaagaaagtattcgcttacgacaacttcatttgccttttcaggaacccggccctctaacagattcatttgcgccttggcaatctccatcatttgcgcgtcacaatacacataggacgcatgatagccctgttccgaaagttcctcaccgagcatatagtagccgcctacgcgctcaaactccggcagtcctttcagggtttcaatgtcgttttcctctacgcccagccagaccgcctcataagtatcgacaacctgattgcgctgcatttgtgtcagggaagtagctacaattcccgtaaagcagatcagaaatgccgccagcgcaacggcgatcactaccatcagattccggcgcttctcgctttgcaaacttttctttgccagcttctttgtaatggcgctggtatcattttcaaaaggccatgtcatagcctgccacctccttattccacaatcttgccatcctcaatgcggacaatccgatctgcaaggcgggcaatgtcgttgttgtgggtaatcatcacaacagtttgccggaactccgcactggtacgcttgataagccccagcacctcggcgctggtcttgctgtcaaggttgccagtcggctcgtcggccagcacaatagccggtttggtaatcagggcgcgggcaatcgccacacgctgctgctgtccgccggaaagattgttcggcatatttttcagtttatcttccagtcccagcaggtgaacgatctcgtccaaaaacttctgatccaccgtgtccccgtccagctccaccggcaggacaatgttctcatacacattcagaatgggaacaaggttatagttctggaagataaaaccgatgttgcggcggcggaagatggtaagctgttcgtcgttcattttcgacagctctttgtcccggacaatcacattgccggaagtaggggtgtccagcccgcccatcatgtgaagcagggtagacttgccgctgccggaggttcccacaacggccacaaactcgccgtcatttacggagaagttcacgccgtcaagggcgcgggtgatgttcggctctgtgccgtaatactttttcaggtcgatagtctgtaaaatgctcataaaattcaatcctttctttgtttgttgtaaatgtggaacgctgctgcgccggtggccgccaactgcaccagaatcagcacagcgaacagaccgaagctctcatagtagaacaattcatcccaaaataggagaacatcacagagagcagtcaaggcaaccgtccagcggatgtgccgggccagccattgccggaacaccagcacaagggcaacgggcgggacgatcagcagcgccagattcaaaatcaaggtcggggtcagttccattgcgtcgcctcctcacttttgttgataagggtattgtaaaacccaaatgtccgcgaaatgttacagcggccaaaaattttcattgaaaatcggggtgaaatgttacaaagctcggacatttcaaaatcagtttgccattttgatccgttccaccaacgaatttctgcattgaatttttagacagatagcagaaattataataggtgttattattaagcagacaccgtaaatcagtaatggaataaaaggaaaagcatattgaaaataagttaatccattcgcagacaatatccgtactaacaaataacccatcaaggttcctgccacaaccgtaataatcaagcatggaataatcagtaagacactttcatgcagcagcattttctttatctgtttttttgtcataccgatagactctaatattccaaattcttttctccttgtactgatacgactaatcaaggtgtttgtcagattaaaaatgctaaacataatgacaaaggcagatactccataaacttgtacgctggtattatgaatcgtatttgccgaagatgcttttacctcttgtaaggtttccattaccaaatcagggtgtcgggacagtattttatttaatttgctttctactgatttacccactttttcatattcaggtacggacaaagttaaggaagctgttaaatccatatcgccccacaacttttctatggtttcttttggaagataaaagccctcattcatacttttttcggaagtaccggcaatcaaaacatctatgctgtgttcagttccatcaaaccatcgtaatgtcactttttctcctattgacgggcaagtatgatagacttctttctgtacgcttgttcccaatataaccatagcgtcttgttccaccaatgtttcgtatgtccaatcaacaggaaacgttttcaaaatttcttcctgattatcaggcgtaatcggaataatgggaatttctaattgttcattgtgatactcaataatagctgcggttctctccgtagcataaatctctttaacttccgggatttgttgcaattcttccatgagttcctgtgaaaaaggcgtatcaacttgatactccgaaataccatacggtttcggattgactaatgtattgtggttaatcgtaatataatattctccatcttccaaattccccattctcgcaaaggaatctggattccatgatgatataaaagtggctccaaccataaataaaatcccgccgattgcaagcgaggcaatcgtcagattgtgtttttttcgattctgcttttcgctcaatacggctaaagaatacggtgagagacgaatatgatttttcctgttgcacactctactttcttttagttctggatcgtttccaacatattttgttgcttcaataggggaaatatttgaagctatttgtgcgggcttgtatacggaaatttgtacgatgataatacctaatattattgcaaaaatacttgtggctatggcattgataatcgttattccattcggctctaacaaatatgcaaatatgatacctactgtaataccggcaggtattccgaacaggcagaaacgatacccctctttacgaatcatccgcttaatctgtttttctgtcatgccaatagttttgagctgtccaatctgcgacacttgatttgataccgaaaggtagaacacactgtatatgacaattccgcttgaaaatgcaataaaaagagtagctaaaagaacacctcccattcctgatccactaataagtgaggaacagaatttgctattaaaataaagttggttcctgcttatgtcttgggataaagccagacgatatactgtattctcaaaatcaataagtcccatttccgtggcaccatttacacgaatcaaggcactatatggaatatcagataataacacaccctgttctgcatacgctggggagacataaaagtaaaatgttcctgtttccacattatcagtaaaaccagtaatgatgaaatcctctgttttactccccgccgttggtaaagtgatggtatctcctatatttagctgataccccagctctaattgaacatttttatcaattacaatttcattgtactgttctggacaggttccactgactaattcataggattttataattccaaaaccagtcggcatataaaccgcttcaaatttgatcccatccatcagaaaactatcactatgcttatagggtacaatatcttcaagatcaggttcttttttcagaacttctatctgttctgctgtaagccccccgatggtagcttgctgcatttgattcaaaatcttttgttcactaattttgctgccttgttggaataaggagattcccacaatcaaactaattgccagcgcaatggtcaaaacattaaaaaagcaaaaaatacgatttgaagatacattgcgttttgctaatttctttacaatgacgctggtatcgttctcaaaaggccatgtcatagttgtatcacctccatatttgataagggtattgtaaaacccaaatgtccgcgaaatgttacagcggccaaaaaatttcattgaaaatcggggtgaaatgttacaacgctcggacatttcaaaaaaattcacggcggacagccggaaatggtcgtccgccgaatcatactacacaatcttttagatagattgattgtgaaataatttcaatccaatcaccacatctatcataagttccacaatgagaattatactaatggcaacattaaaattacataggttatataatccgatatagatttcacaagtaagaaatacaacttgcagacacaaatttaagtatgtcactaaatgctcgttagttctattccacaatctaaacaggaacattgtaaaaataggttttcccgtaaaagcaaaaagcactgacaataccggcaccaaaaatacatagtaagaatctactgcattgctgggggatgtacctacccattgaattgctattttatcaggaacaacgaaaaataaaacaatagataaaataacattgattattaagatgattgttgttgctttgcaaaaattgatttttttcatggtgttttctccttttataagtgtgctttatttagtcggcaacataatggaaaattccgaacccttgcccggctccgaaaccactttgatatagccgccctgccgtgttacgatctcgcgggccagatacaggccaatgcccacgccctgctgttcgtgtacttcttcctcacgatagaagcgccggaagatggcggcctgattgctttcggaaatgcccttgccggtgtcggctactttgatttccacatacatttcccacagcaccaccgacacagcgattttcccgcctgccggggtgtacttcaccgcattgtccagcaggttaaaaagggcttcggatgtccacttgctgtcatggaaaacggtcaaatcctccgggcagtccacggacacgacgatttcctttttctctgctgcatacacaattccactcatggcctgtgccacggtatcaaagaggcggcccggtttcttatccaactggatcacgcccgtttccagccgggaagttttcacaagggcctgaaagagaaagtccagcttatccgtctggctgcggattccccggataaagtcggtgcgctccgccttggtcataggcttttccagcagcgtgtccgtcgccattttcagattgcttaccggcgttttcacttgatgggaaatatccgatacaagggtctgtaactcctgccgttcctcgtccacccggcggcggttctcctgcatgatctgatagagccttgccagccggtgtccaattctggcaagctgggtttcgctgtcctctggccgctggggcgcttcattcccggcgatcatgtggtctaaggtctggcacaggtcagcggtaaactgcgacagccgctttccaaacgcctgcgtcagtacaaaaatccccacaagggcgcacagcagcagcgtcccgcctgtcagcagcaccgcaatctgttttgtcacaagaaacagggctatggtgatcccggacatggagagggcaagccctattgccacccggccaaacagccgctttaccgagaggttttgaaacttcattttgcctcgcctcccgtccattgatagcccatgccgtaaacggtcttgatgtagggtgcgccgccgtcggcttcaatcttgctgcgaatccggctgatagaggttgtcagggtgtgttcgtccacaaacctttcgtctatatcccacagcttttccaaaagctgcccacgggtcagcacttgccggggatttttacgaaacaggttcagcattttgtactccatcggggatagagtcaggggcttgccgtttaaggaagccgtctgctccgagaagtccagaaacagccgcccgtcgtcgtaaatgtccttggccggtttgtggtgttccagcatggcgaacatggctttgattttccgctgcaaggccccgatcacaaagggctttgtgatgtagtccaccgcgcccacctcataaccccgtatctggtcgctctcctgatcgttggcggtcaggaaaatcacgatggtatccgggtgctggggctttatcagcttgcacagttcaaaaccgttcccgtccggcaggttgatgtccagcagcactaaattaaattcccgctggcggatggcgtcggctgcggttctggcatttagggcagaagtcacgccgtagccgtctgcggtcaggttatagtctaacatcttattcaaaaaactgtcgtcctcgacaattaaaatctgctccatattctcacttcctttgctttttgcagatagtataacaggcaaatgtccgagaattgttacaaggacaaatatatttatcattttacagcttttttatgtgtactgcaattttataaaagaaaggacagcagtatcatcaaattgctgtccttgcggtttattatagctggtagtgtataagcgtgggttcatcatatttggtgtggtatctttaactatgggaaactccccataccctctcaataacagatgtttcacttatctgttggttccacctgaagatgttcacagcactatttttaatatcggaagggacagccgatattaaaatatgtggactcccggtgggaggaacagtcgaagcgaaaggaggatctgctccatatttgcaaggtatatccgctgtaataagagattcacctctatcaatttctacaaatacattcctgttttctttaaagcactccagcttatgtccttctttcgcacaatgcacataaaatgtcagtaatctctctatctttccttcgcatagttttttactcccttcaaatttcgatttctcagtttcaaaaattggaagttgttgatttctttattatctagtctgttagtaatctatccaacagcatctgcctattatttataaacatttctgttacctggtaactctctgtatcctcatattcgcacagatgtatgcgtccattatcaaaacaatagatatctgcatctggtattcctaacaaaatcggcgaatgcgtaactataataaactgtgctccctcttttgcacatctgtatatttgcatcaacaatgtaagctgtctctgcggcgataatgcagcttccggctcgtcaaaaagatacaagccatttggattcatattattctgcgccaatgcgagaaaactctctccatgtgatttttcatgatatttagcggaaggatgtgtaatatctgcatattcttcttcctgcgttgcaacattataaaagctttctgccctaagaaaatatccccacttttccttccgatagcctttggcaattcttatcgcatcacacaactctgaatgtgtatcatgcgtagaaaaaacataattctttgttcctccctcaggattaaaaccatgtgctacggcaagtgcttccaacaaagttgatttaccactgccattttctccaacaaaaaaggtgattggtttattgaaatcaagtttttcaattcccttaaaagcctcgatttcctttaaataactatcgttatcaattctattccaatcgaatattactctttgtatgaattgattattcatttaattcagcctcaatttcttcaatagtaggcatatttgcatctgtaatcaattcgtcctcaacctgaggacaaatcactgcgtcaggataaatctcataaaaatatctcatatacaatcctttctaatgtgtcagttagacaaattccgattgaacaaaatcgctgcgtgatggcctgccaaggctgtggcgcagttttatttttattaaaaagcagtggaattacttttcataatccgttattgttaagttaccacacgaaacaactgaactaagaaagctccactggccttcggctatatccttcccactaccaggcggattcgggactttaacccgttagaaacgtgcgccgctaggcgcacaacgcaaaaaaggaagccatacaataactgtatgacttcctgtatacactgcatgttattcgcatcgtcgtgcgaatggcacgaatggctttgttatgatagcaaaatcagattaacgaccgaactgcatatcgttgttacctgattttgttgtgaacatctcaagcatgttgattggatcgttgtaatccataagccatccctcacgggcgaaatcaaactgtccgtccttacggctgttaaggaatacgttccactcctgctgctcaacctttaagttgatacctacctttgaaagatcagcctgaatagcctcaccaatctttacatttgactctgagttgtttacaaggtatgtgaactcgacagtctggtttacctggcctgtgctctcatctaataatccgatagaagcaagaagctctttagcctcctcaaagttcttatcgtaatctgtgccgtagtagtccttgttcttgaactcgccaccgttaccatctgtaacaccctctgggataaatgttgtggcaatcttctgtccgccctgggcgattgtatcgataatgtactgacgatcgataagaagacagattgcttttctgaataccttagcctggtcagcatctaatccaagttctgagtagagcttagagttaatgttgaagcctacgtagtatgttccaaggttgtcaactgtgtagaactcgcttgtcttcttagctgcctcaatctctgctgtaggaattgaatcaataaaatcaaggtcaccgttctggtaagctgtgtaagctgaaacatcatcagatgtaagcattacgttcatctcatcaactgttacattgtcagcatcccagtagttaggattcttaacatatgtcatgcttgaatcatgtttccactccttgagtgtgaatgcaccgtttgtaacgaacttgtcgcttgcatcgtttgcccagtcatcatttccctctactgacttctggtttacagggaagaagaatgggaatgcacataagtcaaggaagtatggtgtaactgctttaagcttgactgtaagagtctttccatcatcagaagctactacatcatcagcagcaagaccctttgtatcatcatatcctgcgaatactgcgcaaaggtagctgtaatctgcagctgtcttaggatctgcagctctcctccaagaccactcgaaatcctttgcagtaagctcatcaccgtttgaccacttaagaccgtcacgcattgtgaatgtgtatgtgaggccatcctcagaaacctcatagctctctgcacatgcaggctcaagcttgccctcagcgttgtaacgcataagaccctcaaagctgtttactgcaagacatccgccgtcaacagtactgtttaatgcaggatcgatatgatcaggctctgatgccatgaagatgtttaactttccggcattctttgtgttctttgcattgtagaagtatttcataccctctactgttgagtatacgtctgtgacataatccttgagcatatactggtcattgtagtagtaaagtggaataacacaccatgtatccataagcatatcctctgcctggtgcatcatctctgcacgctttgcaagatctgcttctgtacggatagattctactaactcatcatagcttgtccagtctacggctgttgatacagcagtatcagaagtgtcgttagtagttgttttgttgttgctcttgcttccacaagcagtcatgccaagtgccatagctgcaacaagagtaagtgctactaatctctttttcatctttcttcctcctattaattaatatgaaaaataaatttatgttagaaccggcacatgtggcttaagctatatgccggtaaaaaccttatattagcggttgaagcatgcaaccatatgtccgtttcctctgtctgtaagctccggacgtgctgctgcacactgttctgtcgcatatttacaacgtgaacggaacggacagccgctaggcatgcgaagaggtgaaggaacatctccctcaagcacgattcgcttgctgtgtctggcagtctcaggatccgggatcggaaccgctgaaagcaacgactgtgtgtacggatggattggattgtccatcagctcatcagcatctgcaagctccatcatatgacctaagtacataacagctattctatcagagatatgctgcactacaagcagatcatgcgctataaacagatatgataaccctctctccttctgcagatcctcaaacatgttgactacctgggcctgaattgaaacatcaagtgccgataccggctcatcacatacgataaacttcggatctactgcaagcgctcttgctattccgatacgctgtctctgtccacccgaaaactcatgtgcataacgtgtggcatggtctgcgtttagtccaactgtctccatgagatccataatcatctcatggcgctctttcttgctattgtagagcttgtgcacatcgagaggctctccgatgatatcctctaccgtcatacgagggttgagtgatgaatacggatcctggaataccatctgcatctgcttacggtaaggatgcatattcacatctatcttcttctcactgtcaaacaatacattgccgtcgaactcaatgcgtcctgctgtaggctggtacagacgtaaaagagtacgtcctacggttgtctttccacagcctgactcaccaacaagtccaagcgtctcacccggctttatggcaaatgacacatcatcaactgcctttaactccatctttttaaatccgtcatgaacagggaaatactgcttcaaatggtctaccttgagcaggtactcgttgttatttgtctcattactcatttgattttccctcctccatcatattcttaatattcatccagcatgatgcgagatgatcctctccaacccagatttcctccggcttttcggtgagacatatcttcatagcggcatcacagcgagggcagaatgcacagccctctggcatgttgagcatattgattggtgtgcctccgataggaacaagcctggtttttgaattggtctttgtagggattgaacgaagcagtccctttgtgtactcatgcgccgggctgtagaatatagcatctgctgttcctctctcacacacacggccgccgtacataactatgatctcatcacacattgaagcaatgacacccagatcatgtgtaaccatgatgattgccataccaagcttttcctgcagtgactgcataagctcaagaatctgtgcctggatagtcacatcaagagctgttgtcggctcatctgcgataaggatatccggctcacaggctaatgccatagctatcatgacacgctgtctcataccaccggaaagctcatgagggtactgatttacacgcttctcaggctcatttactcctacaagtgtgagcatctctatagcgcgctcttttgcttccttctttgtacggtctgtgtgaagaagcactgcctcctcaagctggtagcctaccgtaaataccggattaagcgatgtcataggatcctggaaaatgattgaacagcattttcctctgaaatctgccattttctttttgttgaatttggtgatatcctcacccttatattttactgagccgcctgtgatggcaccattctcagcaagaatctgcatgattgaatatgctgtaactgactttcctgagcctgactctcctacgattccaagagtctttcccggctcaagcttaaagctgacaccgtttacagctgatacgtctccgttatcggtcttgaaggtagtgtgcagatcagatacttcaagaacaaacttattatcttccatcttactcactccttactatttcgataatttagggtcaaatgcatctcttaagccgtcgccgataagattcaatgtaagaacaatgatacaaatcgtgagcgccggaaaaataagacgcaatgggtagctctggagtccgccacgcgctgtatttgccaacgaaccaagtgaaggcataggagccgaaacaccaagtccgataaatgacagataactctcagtaaagatggctgatggtatctgaagcgctgtagtaatgatgatcactgacagacagttcggtaaaatgtgttttctgatagtgcgggctgatgatgttccgatacactttgctgcgagaatgtactcattctgcttgatggtaagaatctgacctcttataagtcttgccattcctacccagtaaagcaatccaaacactatgaaaagtgcaatcatgttgacacctagctttgaaagcactgtaccctttattacaggtgttagcacctcatttaatacaactgcgagtaaaatgatgagcagcatatccggcaatgaataaatgatatctactattctcatcataaccatatctaccttgccaccgcagaagcctgatacggaaccgtaaatgataccgattataagcacaagcagtgatgcaaacacacctactcccagtgatacacgagctccgtaaacaacacggataaaatagtctcttccgagctcatctgtgccaaaaatgtgcgggaacagcttctcacctgcatcaatctgtgcctgctcagcatcgctgtactggaaaggtcctaagttctgtgcacccttaacgatatctgcatagccgtaaggcacaatctttggtgccagaagaataaccaaaataagtaaaaccaaaactataatagaacccatagccagtggatttttgcggagtctcttaagaccatccttcaagaaggtagttgactcacccataacctcctgctggcgtttttcttcatctgatgccttggcaaaatccttcatatcgaacttgctaaggtcaatctgtgtggagaaaggagctctcttcatattatctttcatctttatctctccttaatcaagcttaatacgtggatcaatcactttgtatacaatatctgtaatgaggttcgcgcctaccatgatgacagctaggaaaagcgttgtggccataatcattgtgtaatcacggtttgtgatacagcttacgaacttggaaccgagtcctccgatattgaaaatactctcaataaccattgaacctgtgaggataccaccaatcataggtcccacatatgtgatgaccggaatgagcgcattacgaagcgcatgtacaaatataatcttgtactgatgtacacccttggcctttgccgtacggatgtaatcctgtccgagtgcatcaagcattgaagtctttgtaagtcttgtaatatatgccatcggtgaaagtgacagtgacagcaccggaagtaatatcatgttgcttcctgagctgaaggcctgcaccacaccaagctttatacagaagaaataaagtaataacgtagcgatgacaaatgacggcatcgacgtaatcagtgtgacgaagaatactataactcgatccggccacctgtttcgcatcagcgctgctatcgaaccgagcaccactccgaatactatcgcagtgagcgccgctaaaagtccaagcttcgctgaaatcgggaaactctccccaatgatatctgagatcggacggtctgtcttaagactaacaccgaaatctccgtgcagcacgcctgccatgtagttcttgtactggactataagtggctgatccagtccgtagcgtgcctcaagctctttcattaccgccggactctttgccttctccgaattgaatggaccacccggaattgcattcatggcaaagaatgtaataagactgataatgaagattgtaaaaatcgcgagaataactctctttacaatgtacttacccatatttttctctccctcttggatttgtatcgataatgcattatttttattttttaaagcattatcactgcaccacgtcaaagtattttgtctaatacgcaaaaaagtgcgaatgacgtcattgtcattacacactccctaatcttgctgtctgatacaactgtcgttctgacgcgaacaattcttttttattatacacagaaatcatactttgtcaattggatatattttcctatattattttcatttttgcataaaaattagtcatttttttataatactcattaataagggtaatttatgtagcttataagcattatttatacatttttattcatttttattttcgcattaaaatattaatttttagtgtatgattactttgaattgttaagtaccggcgttattctggcattaaacggatatttggtgtataattacatatcattatatatcaaggagccacctatgcttacatacgacgatgcactcaatctcaactactataaaaaaacaacctttaccggctggatgaacggcatgcgctttctcataaagcgtgaggagcctgtcatcaaggaagccaccgaggatacacccgaggaaaagggtgagccaatatttcatgcatggatatggccggggccgtatatttttgacctgaccgatgacagcaaaaaaactgacaatacctttccatttacagatgacggtaaaaagcagtgtgtagactggattaatgaggtcatcagtgcacactcaaacgaatatccgaaaaataaaacaaatggagaaaacctctaaaaagctcttgacttctcaccaaaaatattgtagtatacgttttgtgcaaaacacaagggcttgtagctcagccggttagagcgcacgcctgataagcgtgaggtcggaagttcgagtcttctcaagcccatccttgtaataagcgtattatgaaagccacggattgctccgtggcttttgttttatgtgtatctacacctgcacaatgcgtccgtgtctgcctattcctttaaaaaatccagcattaattccatcatacttttttgaactgcactcagaaatcataagctgctgcttatatttgtaatcatcccactcgagaattgctgtgacgtagggctgttcctccattacacgcacagtcgtatttttctttgaaaacacagggtattttccggtgtatcccttttgaagcagctccttttcaagcgctttacgcttttcttttatgcgttcatttatctgatttccgtaatttctttcgggataatcctttgatgcctttatcacaagcttataaatatactgataaagcggtactctttttgcatcggctaaatgtctgctcaaaagcttttccgttttctcacatggatttgccctgtagcgtgcaatgagcttaagataatcagtgtccgaaacctccatgcaaagctcctccataatgtctattccctctacacgggccggaaaatgatactccatcaaatcgcccggtaccggtgtccatctgcgaaacggtgcaaagtaaataaggctctggataaagcattctgtctcgttgcagtattcctttcccatgtacatatacttatcagcgattgttcctaccatatatacaagcatgcgccactgttcctgtccctttacccagaaatgtcctatttcatgatatttaaagcatgcctcatgcacatgcaaattatcaaaccagagtgtgaccacattgtcctgctggtgcagaatgagtccgtagcctttttcacttcctaaaaccaacgatgccgaaatgatttcttcctcgctatgataatcgccctttaacactgcattttccacagtcagatagcattccaccgcgtcattcatgatatatgggattatatatttgtcgtcacttctgcatatatcaaatgaaccgtaatcaaaaagctctgcgagcatgtaaaatgcgcgtggcatatcctcttttaagccaggaagagcttttactaaatccttgtaatcctgcattgtggtatcctttcgtataggaaaaaatgataaaaaaataagaatttcagaagtaataaaaacctctgaaacccttgtaaatagtacgggcaacaggacttgaacctgcacggtctcccactagaacctaaatctagcgcgtctgccaattccgccatgcccgcatatatatgccgcgtacagtagcgcatctgcctacaattgaacgttagcagttcaattgtcaagaattccgccatgcccgcaaacactttgacagtatatcattttgtttcatgtgtgtcaatattatttatcacattacaaaagtgaactattcacattcaaactgtatttccacaacaaaccgcttcccctcaagccttgcttcaatacttccgcccattctctccacaagctcctttgcaatcgaaagcccaagcccgctcgatgatatgctcctcgcctcatcggctttgtaaaagcgctcaaacaccttgtccacgtctatatcatcaggattttttacatcgtttgaaaccaaaatatggacaatcctattttttgaagtacgctcgtcatctgaagccctgcaattgcacgaatcctgctgcctcatctgtatgcagatgctcttctgcccatgcaccagcgcattttttattacattctgaaacacccgcctgagcgcctgcacatttgcagtgataaatatcgtatcctcacatatatcaagcgacggctcaatgccctgctttttccactcctcataatacgaaaacactgtctgctttaaaagtctgctgacacagcaattagacagctctagcttgaagctgtcatttttaagctttgtgaacatgaaaagctcctcgagcatatccttgaggcttgtgatgcgctcctggatgatatctatataatgctcctgcgcgctcttgtcagtctcatccctaagcagctgaaaatagccgtccagcgaggtaagcggagtgcggatatcgtgcgacaggtttgtgtacgtgtcagatatcatctgctcctttttcgctgctgcctcacgctgcctgtgccattgctctaaaaatctgtttatacgctccttaagccttccgatatcagccatgttggtatcggttaaaaggagcatatttgtatccttttcgcataaaaaatcaagctgttcattaatgtcacgaagctgtgcccttatttttacgagcacagctattaagacagctaccgaaactgcaagtattacagtcagtattttccaaatcatgttttattcctcattcaaaacacattatatatccctgcgtttaaacacaccgtacactgcaatcagtgacaccactgcccacacagcggctaccgcaaatgcaccgcctacggtctttgcagacgcactcagatcaagctcagaaatctgattaacaataaggtaatcatttatatcaaagttctttgctccgattttttcaataagtatattgattccactgaaaatgagtgtaaagatacctgtacacatgcacacagcgataatcatgctgattacattgttttttataatgattgccattgccatgacaaaatatacaaataaaagtgtgaccacatactggctgccaagcatcttaaataaatctgctgcatctccgaattctgctccatgtaaaaacagcggagtcgcaatacactgtacaatcacatcaagtgccatagccacaaaggtaaataccgaaagcgctatcatctttgaaaacagcagcactccacggcacttcacctgtccgcctacgctctttatatagccgctgtttaggtctgctgttgaaaagagcaccgtaaatatcgcaagtaaaagtgccaggtcaagacccgctatatcgctttcaaccatatctgctatggtcggtacctcatctgacatgtcggattcatccatttcaagcccgactgttgccgttggtccatttgacgattccgctgatgctgtatcgtattcatctgctatctcactgtctgactcacttaccatagtgacctcatcagttgtttccacgatgctctctgccgccacacttctgacaagagctgtcataccgctcatagctattgcgagtgccatagctattaccagtataacataagctgactttgtatgtatcagtctgtaaatatccattcttaccgcattaaacatttgtcgcacctcctgtgatactaaggaaatatgtctcgagctccattcctgtgaccgctagctgtgccaccgaaactcctgctgtgaccagcgctgtatttaaggcggcgctatcattcaggcgctcatagacatctatatgatttttgtccactatcatgtagtgcacaaagcccatcttatcgagcacaggcactgctttatttggattgtccactgtcagtgtaatcttctcactgcacttggaaagcagctcctctctggtaatttcctgaagcagggctccattatttataatgccgtaatctgtggcaagctttgaaagctcctccaatatatggcttgaaataaacacagtcatatcctgctgtgcacataaattctgaatcgtatcacgcacctctgcaattccctgtggatcaagtccgttgataggctcatcaagcactaaaaggtcaggctctccaaccagcgccatgccgattccaagcctctgcttcataccaagtgagaaattctttgtttttttctttcccacatttaacaaacctaccttatcaagtatgccctctgcatagccctttttactgatgccgaagagacggcacttcatctcgatattttccttcgccgtcatgtttggatatacacccggtgcctcaatcaggcagcctactcttgagcgtacctttgacaaatcctttccagcgtatccaaacatggatatctctccgcttgtcggctttgccagaccaccgatcattctcatacaggtagtcttgccggcaccgtttctgccgataaatccatagattgcaccctttttgatgtggatatccacattgtcaaccgctttctggtgtccatactgcttggtcagtgcctttgtctgcaataatatttcactcacaatcaaatctccttttcttttattccttagcaaccctttaatcataatataaatgtaaaatcctaatacatcgctaacaaaaagtaaaaaaagagtaaagcttgtttacctttactctttcattttgtaaccgatgccccacactgtctctatgtactcgtcatcggtcagcttttttatcttctttctgatattgctgatgtgcacatcaagagtctttgtctcgccaatatacggctcatcccaggcatattcaaatatgtcctccttggcaaacacctgtctgggatgcgccatgagaagctcgagtatggcaaactcctgctttgtgatgccgtcaacagcattatcagctacataaagctgtcttgaaatccgatcgagcacaagctgcctgtgctctattttagcaggacccgctatgtatgtatttgcagtatctccctgtcctgtatcattttctgcttttgtctggttttcccctgccttgcccgactttgaaggcacatctgccaccgcatgacgcagctgcacagccactctggcaacgacctcctttatctcaaacggctttgtgatgtaatcatcagcgcctgccacgagcagattgattttctcatccagctcatcctttgctgtaaggattatcaccggaagtgacgcatccatctgccgtatccgtgccagaagctcctcccctgaaagccccggaagcatcagatccaatagcacaagcgcataagcttccctgtccagcttaagcaaaagctctccctctgtgcctgaccatgcctgtcttgttctatatccggcttttgaaagcgctgtcgcaagcagatcattaatatccttgtcatcctctattatgagtatctccccggatttgttgtctgtcataatattccctttctctatctgttgtaccacttctataataacacttctatactgacaaaatcatgccggacgcatttatctcactgtacgtcctattcgtttgaatccgctattcggttgtttttgcaaactttagtttagtgccaatacacaccaaaaaacaacagtaactttttatattctagaaatatccctcgactccctgcaccagtccgtctgccagattttcaagtgtggcatcgctgtggtcagagcatgcgttgccaagctctacatccactgacggtaccgtgctgtatgaggtctgtgtcaggtctatcgccattgagccattaccgtttatctttgcgccatgagcgcgcagtccttctatcaggcttgccccaagtgcatcatgctgctgccagtgtgatgcaaccggctccataccctttatgccgcccggcactgatatgtaaaagcatcccttatcgtagcttagtccgtcgccatcccagtgcagagcaatatgacagtctgccgcattattgcagatgacagtacgtgccacattgtcaagctgtacatcgcttccgtctcttaccataagcacatcatagcctgccgcaagcagcttgtcctttaatatctgcgccatacggagtgtgacagagctctccggtgtaccatcattaaaggacataccacctgaaactgctactgcttttgttgcacctgcgcctgttgtaccacctgtggtctttgccgagccatccgggtgacaaagtgtcttcaccgaagttcctccgcttgtaccgtgacctgcattgacacctactactatatttttgcggtttgctgtggccttgtacatgaccgcacagcctgaatttatcgctgaatggtctgcatactgccatgaaggatttagtgacacagattctccattctcataggatgctctttctacatactgataagaggaattattatcacctgaattgttctgctcctcgtccggctgttcggcagtctgttcttcctgctgtgcttctgtctgctgcgtgtcttttacatcctctgttaccacctctgtcacggcttccgtttccgtaggcatctcaaccttctgtgccgcctgtgtctctgttgcaggctctgtcggtgtatcctgtgcttttttgccgcatgatgcgagggtaaatatcatcatgcctgtaaataatattgctgtaaatcgtttcatttattaaaactccattttctttttactacattatagacacccccatgatattgttcaagtattaggcaacattactttcattttaaggccagttttaaataatcaatagaaattgtatttcttctgaaaatcagttatactatatgtgaatgcatcgaacatatttttacttgggaggcttgcatggaaatattaaaactgcctgttggaattgataattttgaaaaaatacgccgtaataatttttattatattgacaaaacaaagcttgtcgaacaggctttacataattggagtgaagtaacgctgttcacccgtccaagacgctttggaaaaactctaggtatgagcatgttgcgctcattttttgagattggcactgacaaatcactgtttgacggattatatatttcacaaaataaatctctttgtgatgagcacatgggcaaatatcctgtgatatttatttcacttaaggatgtcgagggtttatcatatgatgaggcatttcaggtattctccagaattataggaaatgaaatcagcaaattctcctttttggcagaaagtgataaattgacagttttggaaaaagaacagttcaaaggattacttcatatagaaaagggaaagtttatttttgacaaggatacctttaccgcttcattaaagcttctttcccagcttttatataagcattacggccaaaaggtagtcatcctgatagatgaatacgatgtgccactcgacaaggcataccagaacggctactaccatgagatggtctcactcatcaggggcttgtttggacaggtgctaaagaccaatgattacttacagtttgctattttgacaggctgtcttcgcatatcaaaggaaagcatctttacaggattaaataactttaaggtgctccccatcatggatacacgatttgatgagcagtttggattcacggacagcgaggttgaggagcttctagccgcctacaatctggattcgcatttcacagaaatcaaggaatggtacgacggatatcactttggaaatgccgacgtatactgtccatgggacgtgataaattacgtggatctgctcagatttgatcccactgcaaagccgcaggacttctggtcaaattcaagcggaaatgctctggtcagaagcttcattgacaaagccgatgtccagaccaaggatgagattgagcgcctgatagcaggcgaatacattgaaaaagaaatatcccaggagcttacctacgatgaaatcgacaaaagcatcgcaaacctgtggagtgtgctcttcaccaccggttacctgaccaagcagggtgtgactgacgatggcaaggtgcgtttatcaataccaaaccgcgagataaaaaacctttttatcaaaaaaatccgcgaatggttcagcgatacaaccgcaaatgatggaaagacacttgaacaattctgcaatgcatttgtggagaaggatactgaaaaaatagaagagcttttcggcgattatctctggaatacaataagtataagggataccgcagttgctaaagataaaaaagaaaatttctaccatggtatactgcttggtctgctgggctacaaagcaagctggctcatcaaatcaaacaccgaatcgggcaccggctacagtgatatcctcgttgaagttccaaataaccgaaccggcatcgtgatagagcttaaatatgccgaaaacggcgatatggatgcagcctgcagtgaagcactgaagcagattgaagaaaaaacatatgtggataagctgaagcgggatggcatgcgcaatttcataaaatatggaattgcatgctttaagaaggattgtaaggttgtggtaagtgaataagacactcattaaaacaggcgtagagaaagactaactctctgcgccagccaaaaatttttttcccagcgatttttttctattatcataaacactaaatacttgagctattaatgcaagcagcataatgataaaaagccctatgctatttccatataaaaatatagtaaatgcctgtattgcaacaattacccagttaattattaataaaataagttcaagatttttttcattttctccttttcttaactttttatataaactatcaaatggtaaaatttatatattacttccctcctaattcaccattttctaatatatcagcattttttgaagaaattcacaaatcaatccaaaaagtgatatcaatgcacttatcagaatgttgaaagcaaaactttctaaaaatactctataataaactcaattactttcttaaactttccttgaataatcattccaataattcccactataacaataattattcctatataaaacataacatatgaatcaataaaccacgttgttatttccattatcacgcatcctatgacaaaaatcactactgacaaattagaaattatttttttcattttcccacgtccttgttctattttactaggtacctcatatttgattaatataatcatcaattttatttttcacatacaataaggtattcctatccctgccttttctaaacttactctataataaataatatacaatctataattcatttgcaatcaaatctgcataaatgacataaattcgcacataaatgatattccacgtatttatggataagcttaatcaggatggcatactcaattttataaagtatagaattacagactttaagaaggatctcaagactatggttgctgattaatatatctttaaatccgcgatatcacaagccttccatcctgcacatcaaccctgaccttattagactctatccccgctgcctcaagcatatcatcagtgagttttatcctgtgagccttatccctgcggtatctcaccatttcagcttctgaatatgtaggtttgtatacgcatttttgtaatttattactttttatgtaattttttacatagatttaaattgaatcatttacaaaaaaacaccgccggttatatcccgacagtgcaataattatctacacaacacaaattctttgaaccttgggagtgtaaactccaaatgtccatactccggtgaaataatcaagcctttttttataagcctgttcctgtatacactgaaactgtttgatgccttttttatagtctttcgtattgcttccactttggtgtcattggtttttgccatagcaaccaacaattccttatcaccttttgacagctcactccatatcttttcatatacatattcctccagatactgactgaattcaggtaatacattatgccatccggtattatgcttaaaacaaagataccccagtacctggaaggcaaacggatatcccctcgtctctttagccatctctgtagcttcctcatccgtcaattcaaaaatagacttgtatttttcagctatcatgcctatattcaacggacgaagcccaattttaggtgccctgtacaaaaatgtgagcgttttttcattctgaagctcataaatattctcataaagacctgtcataagcaaaaataccggaagatcctgtctcatatatatctgaaacaggctgacaaactctttcattgtatcattacatacagcctcgtctattgtcacaagaactctcttatgcttctttttaatcttttcaagcatcctcgtcactgccacatttaaatcggtaatcggagaaacaccttctatttcaacgcccagccctaagaatgacagatttattttagcttcacgaaaaacctctgacaaacttggataattgctcagatttgcagcaaatgattgtaataaatcacgttcagggctcagatcgataacaatccagtcttcctctgccctaaaagttttattgatttctgtgagcattacagtcttccctgagcctctgactcctgtaatcatacaaacctggtaagcagggttttcatcctcaaatgtatcaattatttcataagactgaacattacggttaattaaactgaccggttccttgccaaatgataatgaaaagggattatttttcatctctgcgctcctgttttataactctttataacttttaataatttttataactctttataactttgtaatctttttataactctttataacttatttgtcaaggtcttgtcccatacgcaccctacagtccaatatgttcccctacagcctcctgtagttctcaagaagcttgtgcagatcatcaatctctccaataagcctctttcctatatcggtatccttcacaagcatacgtctcttatcattctcctcgacctctgatgacgtctctatgtcagtattatttatcagggcatcctccaccgatgtaaaaggcgtgtgtgccttgagccttagaccatgtgaattgtaaatcagtgtatagccggcgataccggttttcttgttcatcgcacggcagaagcctccatctatcacaaacagcttgccattggccctgacagggttctctccctctattgcgtgaaccggtgtatgtccatttataatatgcgcatcatcatcatacagcccgaactcgtgcagtatctgacagcagaagctcttatcgtaatacctgctgtagtatgggttagaaggctcttcccacatgctcttatctgtaacatattccatctcaaaggtcttaagccttctgccgcacagcggtgatttttctcctccccacaaaaaccacataaagtccacatcatccttataaggattgtccacatatgcagcccttgccttctcatcacatttgtcaagcagcgcccttccgtgataaaattcgccatcaatatacagcttgtcaaaggctccgttgctatccaccggaacacagccatgatagagcagattgccattgtatacattgtacatgctgcccttgtcatacaaaaacctgacatgcttctgcaggcgctgtcctgtcacaaactgtctgtgcagctttctcatgatgacagcctcctcgtcacttagtgcgtatggtctctcatcatcgacggttggaaagcgctttctgtccactcctacatcctgcaactcgtccagcctgtcaagcatcagcctgtttcccatctcatactcgggatgtgcaagtataagctgcccctcaagcttaaaaagcattactgtgatggccgcccttgcagcctcaattccatcctctataccatatgttttcatgccaaacagcattagctgtcgtaagcttattccgtaggcattctcaagaatttccacattgttgtatttaagattgttgcggatgacattacatatacatgcatcatttccacatgccgcacccatccagagaatgtcgtgattgccccactcgatatcaagcgagtgataatcataaagcagatcgagaatcttatccgcgcttcctcctctgtcaaatacatctcccacaatgtgcagatggtcaacagcaagcctcttaatcagtgcagacaaagcgattataaactcatccgcatcctctaaatcaattatagtctttaatatctgcttgtgatatctgacctggtttgcatcctcatcctcctgcgcatgcaaaagctcatcgataatgtacgcatattcctcaggcagagcctttctgaccttcgacctggtgtactttgatgagagcagctttgcgacaagtataagctgatttaacgtcatagcgtaccagtcactgtctatcttgccctgttcatcaagcagggccattttctctcttggatagtatatgagcgtgcaaagctcctgtctgtcataatcagaaatcgtatccttgaaaatcaaatccaccttttcctttatcacacctgagcagttgttcatgatatgtaaaaaagcctcatactcgccatgtatatcactcaggaaaaactccgtgccctttggcaggtttataatcgcagaaagattgactatctccctgattacatcctgacttgatgaataattttgctttaacagcttcagatactttgtattgcctttatcgttgtacatatttcccccgtaacctcttatttttcaatgaaatatattaattcgctcctattcatgttccatgctataccggataaatcccttaaattacatttttttcattatataataatttttttcacctcgcaaccaaccctgtcgtttgtactaaaaaagatgcgcaaaactaatactattttacgcatctttgacatattttatattctaaataattacatttatttcatgtactcaggtgtcacattcctgcccatgccctcaagcatttccttgtcacttctgattgtggcacacgctactgtcgtaagcatgtttcctgtaattgtggctgacgctccagacttgaatgcaagctctccgtcatttgtaagcaacgctcttccggcgccgagacgtatgtcagcctctggatttatatatctgaaaaatgatactgtacgcagtatatcaggctcactgatatgctcaagtccctcaagcggagtgcctgcaatcggcataagcgcattaagcggaacggaatccactcctacctctgcaaggctgactgccatatcaagcctgtcctcccaggtctcacccattccgatgatgccgcctgagcacgcatacatgccctctgccttcacctttttaagcgtctcaatcttcatatcataggtgtgtgtggtgcatatattggggaaattacgctttgaggtctctatattgtggtgatagctgctcacacctgcctcgtgcagtctgtgaagctgctctgctgaaagaaagcccattgatgcacataaatcaatcttgcactctcttttcatagtctcatatgcatgtattgccttgtcaaattcctcacctgtcagtgcttttcccgctgtaactatcgagaaacggtctacaccctctctctcattcatcctgcaggcctcaagtattttctcctcaggtaaaaaatcataaacctcacaatttgtatgattatgtgctgactgcgcacagtatttacagtcctcagggcattttccgcttcttccgtttattatcgagcacaaatctaccttgtcgccgataaacttctccctgatcatatctgcgcccttacacagctcatctaaatcacatgtaaggaaaaatgataggtcatcatcccttgtgattcttcttccgtctattatctcctgtgccagtgttattggatccattttaatctccttcgtgtcctgtatttcttctctcatttaataagtatcattataatacatatcatccgttataattgtcaactataaatattttctcggttaacaatgataatagaaaaacagaaaaacgtcaagatgtttttatatatttaaacaagcataatcaatgttcctgctatgatgagcaccaatcctgtaaaggatttaatcgtcagcttttccttaaatacgaaatatgaaaacacgattgacacaactatgctcagcttatctataggcactacgacactcgcaagtccgtcctgcagtgccttgtaatagcaaagccatgagccgcctgttgcaagtcccgaaaggcagataaagccaagctcctttttctctatatgctttatggtgtgctgttttcctgtgacaaataccactatccaagccatgataagcaccactatcgtccttatcgcagttcccagattagaattgattccctctatgccgacctttcccagtattgaggtgaagctggcaaaaacagcagacagcactgcataaaacagccatccatgagaacccctggccttattctgctcttcctgtgatatctcctttttggtgatcatcatatacgttccaattgctataagcaccacacataccagcctgagtacgtttatctcctctttaaaaaagataaatgcaagtataatggtcagtattgtgcttgatttatcaatcggcaccactctgtttacatcgccaagctggagtgctttaaaataacaaagccatgaggccccggtagctactcctgaaagcaccagaaatatccatgtctttgctgacacagctgtgatctgcccctgcgctttaaccacaaataccataatccatgaaaaaatcaaaactacaattgtcctgattgcagttgctacgtttgaatcagtttttttgataccacactttgccagtattgatgttatacccgcaaaaaatgcggatccaaatgcatataatacccacatatttttctctgtctacgcttcggtcaactccgttgtccgcagttcgattcctccattcttctaaatacaaaaaaccgttcaaggaacggcttcttttacgctaatgagacatcggggattcgctctacgctccgcttcggtccgcgcttagcagacgtcccccggacgtctagcgccccggtcaactccgttgtccggaattcgattcctacgatgtctgacattaaaaaacgcctctttaagagaggcatttttaatgagacatcggggattcgaaccccggacaacttgattaaaagtcaagtgctctaccacctgagctaatatcccatatattcagattgtaacagggctagttggattcgaaccaacgaatgcaggaatcaaaatcctgtgccttaccgcttggcgatagcccttgagtaatactcgtgcgccgcacggatacgcatataatgcgcacgacactatttgcattaatgcaaagggtggatacagggattcgaaccctgggcctccagagccacaatctggcgcgctaaccaactgcgctatacccaccatatttacttcatatggtccatatggaattgatatgaaataaaaaatgtgcctgaagggattcgaacccccgacacccggcttagaaggccggtgctctatccaactgagctacagacacatatgggatactgcgaatactgcaatatctaagcgggtgatgggaatcgaacccacgtatccagcttggaaggctggtgttctaccattgaactacacccgcatgtagtcggggtgacaggattcgaacctgcgacctcctggtcccaaaccaggcgctctagccaagctgagccacaccccgaaggatttgtttgcgttctttccgtgacgcaagaattagtatatagcaaagggaagaatatgtcaacaactttttttaatttttttatattttttttaaaatggctgccggtcagcttaaaagagcttcccggcaggcattttatccgtatacgttgcaattcaacgcctatactctagatcaccttcacaagcatctctttcatggcgcgaagagccttgcctcgatggcttatggcattcttctgctggggagtaagctctgcagaagagcagccgtactcatctaaatagaatataggatcataaccaaagccgttggctcccgctatctcccatcctatatagccctccatagtctgtctggtcacaagttcctttccatcaggcagcactgcagcaatagcacacacaaagcgggctgtacgcttctcctttggcacaccgtcaaggcgttctataaggttattattctttatatcataggaagtatcctcacccatatagcgcgctgaatatactcccggttccttattcagatagtcaatctcaagtcctgagtcatctgcgagaacaattgcatctgtgtgtgccgctattgcgcgtgccttaatcagcgcattgtcttcaaaggtcttcccatcctccactatatccacattgatacctgcttccttcattgaacggatatccacgtcacagtctgaaagtatctctttgatttctctgagcttatccttgtttcctgttgcaaatatgatttttgtcataatatatttccttccttcagtgcttttgccatatcatctgttatcagaaaatgcctttatacagaggttacaatcctgtttttcctttacattgatatatgccacaccatcatagctgatatagccctcgccatcatccagattgaccgtagacatgtatgcttctcccgagttgtactctatagccatcggatgagtcgagcccggtgtatttatataaagtacaatggcataacgctcaccggactccaaatcaacaggctcatcaaaatcaacagtgtaatagcctgcattttttagtgacccctcagccaccagcgtcttatttttaaaagaatactcattctcaaaattcttaactacatacagcttgtatgaggtatccgctgctgtggcataaaagccggaagcccttagcgattcagccgactgtgcggtaaatatgttggctccgtacatatcctccttgtcgtagcccatctttcctacccagccacacaggtcactctggtatatattatcataattgtcagcgctctctatatctgtataaacaacattgtgcgtgcccacatttgtatcgtagtatgacacatagaacaccccattgtctccaaaactgctgccccagctgttctggcatataaaggctccatctccttccagatccacattgaagttttccttagggtaattgtcatcccagccaattataaccacatcatgatttggcttatcttgacccatgtaacagtaagaattagtctgtttattgtaataaggattctttgtcctggagcttgatattgtactgtaaagcgatgtctgcacaccaccatatttgaaaacagcctcctttatgccctggtagtcctttccatctatgataagcatctgctgcacatgctttactgcagcaagatcatcgcgtgtcactccatctccgtaaggatcatccgcgtcataaaccggtccctgccatgctgccagatatgccattcccatggtatactctccaccgtcatactgattgacgttgaaggaattgctcatactcatatgatccacggaaaacaaaagctgctcctccggcataagggctgactcgagtgcacttgtggccgcaaaagcccaacaggtgccgtagctgccctgatccctgattagtgacacacgctgtctttccctcagatcatactttgttggcaccgttgatacaccctcggatttgtctgtcatagtgagcgtatttgtcgccgtatcaaagctgcaggtcatatccaaaagtttagacagcttgtctaagcttgcataaaactgtcccttatactgtacaaagccattgtcgtctgccagcttgaaatcagctgtcagactgtgcttttccaccagaagctcatttttattgtatacatgtgcactgctgtttagtgcatcgcgaagcatagacacgggaaccattatattcctgttctcatccatatacacatgctcatcctcgctcgtatactccttattttctatcctaagcctgatggtggtgccatttacatcagcagccacaagcggactccatatagtattatctatctgtgctcctctgaacgcgccaagtgtagagctgtcctttgcatatatgtaaaaattagacacaaagataagtgccaagataaatgtaaatgcaatatatctctttgaatatttcatataccctgctaatcctttttccttctcggaggcttaggccccataaactgataaaaatatgtctttatcataccattgtagattttcctgtttttgtcagcttttctgccgatatagcgctctgtatcctcatagctcgtaatcagatacatcgaccatgcatcaagcctcttataagcttctccaatctgtgaatacagtgccgggagcgctgatttctcctcaagtcgctcaccgtatggaggatttgagataataaatccgtacttcttcgggtgatgcaggtcagccacagccctctgctggaaatgaatcatgtgctccactccggctctcttggcattttccctggctgcagccaccacatcagggtcaatgtcatagccctggatgtccacctgcacatccttatctatcatatcctctgcctcctgcacagcctcataccacagctttcttggtatgatattggtccagctctcagctgtaaactccctgttcataccgggtgctatatttgctgccatcatggctgcctctatcggaaatgtaccactgccgcaaaacggatccacaagtattctgtctgcatgccatggtgtaagcatgatgagtgatgctgcaagtgtctcagtcagcggcgccttgctcgttgccagacggtatcctctcttgtgaagggaatcccccgatgtatcaagtgtcaccatcacctcatccttgtacagaaaaacccttaccggatactgtgctccgtcctccgggaaccagtcaatgtgataagacttcttcattctctcaaccatagcctttttcacgatagactgtatatcagatggtgaaaaaagcttactctttatggaagaagcctttttcacccagaatctgccgtccttgggaatataattttcccatgggagagcctttacattttcaaaaagctcatcaaatgtggcagccttaaatcgtcctacctgaagtaatactctctctgcgcctcttaagaatatattcgctctgcatatagcctcagcatcgccctcaaacgataccctgccgtcctccacacgtgttatctcatatcccagatcatatatctccctctttacgactgcctcaaggccaaaatgacatggcacaacaagctcaaatctattcatatattgtgtaactgcctttctataattgtactttacattgttatctaacattgttgcataaatttcaatttttttaaatagtttcagccatatttctgcaactttttttgatatccgcacatagcattgtatccacctatgactgtcgctgtatcaaaaccacgatttcccagatatctggccagcttcatgctgcttccaccatgcgtgcagtaaaaaatcacactctgtgacacatcgagttcactctcatatgaatccgtgatatccataggcatgctgagtgcgcctttccagtgcgacctgtcgtattcctctcttgttcttatatctataagcagtgcattcatctctttttgcaccttataaagctcatccgcataaactattttaaatttcatacatccatacgccaaaatacgaatttacattatgatattcattttattatgagatgtgaactgcgataaatcaccaaaatcattatagccggtgctttagaactttaattctttaataaattaacccgttttattaagattatattattttgtctttcaaagtattgctttttaattactgttattttataatgtttccgaaaagagaaatcttttcaatgttatacctcttattaattatttatactcccctcaaaagagccggtcacgtgaccggctcttttatactgcttatatttttttatatttatcaatccaaaagcatctcatactctgctaacggcagtggctttgaataataaaagccctgtatactgtcgcagtctatattcttcaaaaactctacctgctcctgactctcaacaccctcggcggtcacgcagattcccagctccttggccagcgctatcgtgtgcacaagcagcctctcaccatttgaatctcctatatagtcaatcaggctcttgtcgattttgagtgtatcaaagcacttcatattgagggtagcaagtgatgaatagcctgagccaaaatcatccaccaaaagcggaaatcctttgccatggaatctatctgcaatactcttgatttcatcattatcgaccgctgcactctctgtaatctctataggcacaagatgtgtgtatatgccgatttttcttgctatatcatgatatcttttgaccacagactcaaagtacaggctcgctctggacaggttgattgagataggaactatttttttcccctcatcaagccatcttctctgatgtgtacacaccctgcggaacacatactcatcaagcgccttaatcatgccgtttctttcaaaaagcggtataaatttggatggcggaataatctcattatttcctcttctccacctgacaagtccctctgcaccgaccagcttgttggtctttggagcatacttgggctgataccatatctcaaaacgattgtcatttaaatccctgtagaagttatcctccatctgcttttcttcgacaatcctttctgtatcggcctgactgtatatctgatagagcacgtccttccgctccttgatccgattcttggcaaagttggcctcgctgtatgcttcctcaacctttttgccagactcccattttgtcacaccaaagtatggctgaatctttggaatctttaaggattctgaaaccttaataagctgtaaattgatggtctgtatctttctgataacattatttatcttgtcatccgcacagaaaataacaaatctgtctgcatttatatgacctgatatgtcattatatcctacaacaccgcgtatattttcagaaatccatctaagcgcctcatcgccctttgccacgccacagatggagtttactatcttgaaggagtgaatatccatggaaatcagatatcctgatacatttctgtcacgcagcttctttttaaagctctcgtaattgttgcctccggtcactgcatccacatacgctatacgctcaagctctctttgcttctccgggcttatatccgaaaagcccgctatcatcttgtgcagctctcccacgccagacacattgacaaacttggctctgcaatactgtacctgtccatccctcacgatgcggtaatcatgctgataggtatcctttatcaaaaactgcctgcgcagattattaattgatgtctctaaaagcatgtgaagcttatcctcctctaagacgatagcatttacatactgttccatcatctcattatagcccggttttgactcaagcacttctccaaacatagcacggacagaaggattcatcctgtacggatacatcttattgttgtctacatctacatagtagatactgttgaagttgcttcctaaagcattcaccatctcactctcgttaagacgctcatcaagctgctcagcaagccctattgcctcaactgttctgccatcatcatcaaagcaaatcgacttgaatgatatcctgtaggtatctgttccttccttggcatgcagtactacagtagcaaatttttctccctctgcaatctgtttaacagccttcagcagattattcctgtcaaccatgctgtctataaacggattgtttataatatcaacatttttttcttctgagtcatctaatgaatcctctgataaaaaagacctcaaacggcattcctgcggaaagcacttaaaaacatactttccccaggatgcgaatgcggtctttatatccatctctatattgttttcatcatcaaatctattactcataataattcccacaaaaataaaataattattaaaaattttatatctaattttcgattatccgcataaacactatactttcaagtattttgaagtatagaaaaccattcattttaccacgaatttaccacgattgaatgagccttgatatgatgataaaacgactaagggagatagcacaaataactgtgcctctccctatattttctttgtttattccgttgattacttcatttgatttcaaactttaacgcctttttatatctcgtttttttattcctattatattcatacctcaattctactttttaaagctaataagttttccgttgtattttacaatgatgaatatgatataaaacactcctacaacaatcaaagtaagccctatgtagtagcctaattcagaatgagagattaaattgataatcggcatagcaataacgccaatgctaaccagcagagaacctattcctattctttttgtaaacgcttttttatcttttgggttgagatgtgtataatgataactatgtaagaaagtaatattttcttttatacccacttgataagataaaaataataaaaacaatcccataactatttcaacaaccacttcttctatttccataatcatacactccttaatcaaaataaaataattcctcaaattttttatctaaagctatacaaagcactaatgctaattttgctgttggattgaactgtcctgtttcaatagaacttattgtgttacgggaaactccaaccatttctgctaattccgtttgcgataattttttttcttttcgcacctcttttaatctattttttaaaattaaatgttcgttcatattacaaacctgctgtcaaaaatttataaaagtaatacaacataaataggacaaagaatagggcagtaacaaatttaggtttacttcttgaaagatatgcttcataactcatatatccaaatgctaccgaccaaataattgtcattatgtcattgtaaggttctttacaaataaccttaataacaaagattaaaatgcagacaagcaacacaaacattagcccaaaagatttccctttaagtttaatgtgtttttcatactcatcaagatataagttatcttttttgttttgtgacagtattttttctttatccatttatattacccctttccaaaaataccaagtatacttgtcatttttattataatactcaatctctaaaagtcaatgtttttatactgttttcttattattttatgacggcgtatttttttccatgagattatacgccgtcaataattatgttacaattttccagttactatccttatggagcataagctcatactgtgatacttgcgtcgcctttgtctgattgtcgataaactcatgacactacaccttgtttcctcttgtctgccagaaacagaaaagaaaaagccctgtcaagagccttgccaccattggtggtgctttgcactctttactgggctttttgtttgctgtatcttctacaaagaggaaaaaagctattcgtcctcatcatcaaaatggttatttttcaatacttcccgtaataattccatatcttcttttgaattggggtttatcatttttacgacttgatatggtgtcctatatttatgcccctctatgctttccccgaacatatccatgctgtataaatcatcatagcggtctaacagtttttgaaatttcaaatgctggataaattctttgattgggtaaaggtcggacgctacaatgcttttcccgttgatgtagtcggtaatatattcccgtaacttctctaactcatattccagccattcttcctcgctgtcaaagaaattgtcataatgcccatgtttcagttctgcatttagtctttcttcaattcttaaaaactgacagacttccttttcggcttgattaacatacttccattctcccgataataattcattgggcgttacacccagcacgtccattatcttttctaatgtatcaaaggtaggataattcacacctcgttcaatcttggaaaggctctgcatattgataccgattttgtccgcaagttcttgttgtttcattcctctgtgttttcttatggtctgtatgttctctcctaagaaactgattttcttttcgtaatgctccatgacttagtataaacactcctttcattgcttttattggtatttataagcatatcatacttaatatatatctaaaagtcaacaaaaacttcttgacaagtaattctaatggcgttattatcgtgttagatagagtgattaagcacgctagggttaatcacacgcttgagtaagcatagaaaagatatattttcactttgatagcatgaataagcatggactatcagaccgaaaataaggtttctgactggggctgttccgttttgtaaacgaaggggcagttctctgcaatgtcaaaactgctttttcgtttaccccatcatcgattgtaacctaaagaatttgacaagtaccttatagcttcatattttcaaacttattatatcaattttttcttgatttaatcataaaaaatgctataccagcaactattatgtatccgaacaatgaaataacagatgattcaattccaaactcaccacctgtgatggcgaaatcttttgaattaagtacatatgtcattacagaatatttatccattttttccccaatggctaatcctcaaccaataatcacaacgttccagatagcatgaactattccgctattccggtaaatgcaacccctgcacttaaagtattgaacatctgatttccattcatatttgaggatacatacttaccgttgaatattaaaagataacttcctttccacggagagaatatcattttcaactaacaattcggtaatgttcataaagaactgacggtatacgaataagattatgcagcgtaatatttattatattgcatgtataaattgatttacatagaacaatgcagccccgatagcaggagtgtattgtccatttgtgccaacaaaaatgtgctctttgtttaatgcgaatggtgaggaaacattgatatgtttagtcaggtaggcaatgtcgtcctctaaaaaatatggtgccagataaccactgatgataataggcgcatcaataattaaattaatgtttttcatggcaaaggccaggtgatggagataatctttccagatttgtgtaagctggggagattttttttcgcgtaaaagagaaaaaaagtcttttatattcataccggcagcctgttccagagcgttggcggaacagtaagtttccagacagccgcggtttccgcaataacagagcggtccatctggattaatacagatatgttcgatcgtgccgctgtgcatagaacttccctgatgaatctggtggtttgtgatgatagcgcctccgagattacgattcagtagaaagacaacggcgctgtcaagttccgggtgtttccataattccagaaaggcagcagactttgaatcatgttccaaataacatggataaggtagataacgggaaaagtcctccagtatcatgcctgtattgttcatgatatttccatacagcacagtagactgatcaggggaggtgattccttgtgtagcgatggaaacaccaagtatcttttcttcatcatactgatttgtggcaatgaattctttgattttatcggtgacctgcttatagtaatccggcgtgttggaatatggaaatggaatggtattggtatagagtgtatttccgtataggtcaacggcagtgatatggaacatattctttaaaataccaatgccaatggaaattctgaagtcagatacaatctgaatcgcatttgcttttcttccgccggtggattcgaaatatccatttttttctattaagccatcctgctctaacaggttcagattctggcttacggtggacaatcccatctgtaaatcctgaacgatctggagcttggatgttattttttttctgtagatgtattgataaacttttgatctgtttattttttttacgctgatattggttaaacctttttcactcataagattttcctgattctgttatggtagctgttttataaattatatatttgatatagtctggcagagcgcaaaaacttgtcagattttctggattatattatttcctgaattgttatagatagagttaagttctagctttatgtatattgtagtatatagaaagtgaaaatgcaataacgataataagaacagtaatggtcaatataactggtaaaaatgcataaaataagattaaaaaattatactttttgtcaatagacttttagatagggaggatatatactcgacttacagttgagatataaacgtaagtttgaaacataataaaaagaaaacaaggagtatatatcatgaaattatcactgaatggaatcaaagaacaggaagcatgggaaaaggccggaatcactctgccaggttatgacgtagaggctgtttctgagaaagcgaagaaagaacctggttgggtacatttcggaatcggaaatattttccgtgtatttatcggtggtattgctgacggccttctggaagagggcgtgcttaaccgtggcattacatgtatagagacttttgattatgatgtagtagacaagatttatgatccatatgacaacctgggattaagcgtaatcctgcatggtgatggaacacgtgaatacaaagtaataggagctcttgcagaagcagtaaaagcacagtcttcagacccggcacactggaatcggctgaaagaaatctttaccagcaaatccctgcagatggtttcctttacaatcacagagaaaggttacgcattacagaaagctgacgggacatggtttccgtttgtagaagctgatatcaaaaatggtccggataaagcaacaggtgcaatggcagttctggttgcgatgctttatgaaagatataaagcaggcagatatccaattgctctggtttccatggataactgctcacggaatggtgcgaaacttcgtgaatctgtactgactatgacagaagagtggaagaaagtcggattcgtagatgaaggattcgtaaattatgtaagtgatgagaaaattgttgcgttcccatggacgatgatcgataagatcacacctcgtccaagcgagcagattgcagcggaccttgagaatcttggcattgagaatatgcagccggttatcacaagtaagaaaacatatattgcaccatttgttaatgcagagaaaccgcagtatctcgtaattgaagataacttcccgaacggccgtccggctctggagaaaggtttcggtgtatatatggctgacagaaatacggttaacctttctgagcgtatgaaagtaacagtatgtctgaaccctgtacattctgcaacaggtccgctgggtgtggttcttggatatgatctgtttgcgcatatgctgaacacaaacgaagatatgatgaagatggcgcgtatgattgcttatgatgaaggtcttccggtagtcgcaaacccgggaatcctttctccgcaggcatttgtggatgaactttttaatgagcgtttcccgaatgagtatttgggagatacaaaccttcgtctggccgtagatgtatctcagatggttggtatccgattcggtgagacaattaaagcatatgtagcgaaattcggagacgcctccagactgacagctattcctttgggaatcgcaggatggcttagatatatgcttggtgtggatgatgaaggaaataaatttgaacttgcaccagacccaatgaacgaggaacttcaggaacagtttaaggatatcgtagtaggaaaaacggagacattcaaagatcagctcaaaccgatcctttccaatgagcgtctgttcttcactgacctttacaaagatggagttggtgaaaagattgaagaaatgttccgcgaaatgctcgcaggacctggggctgtaagagcaacaatacataaatatgttggctgattgcaggtatagtgataatgaaaaaatcggcgtcctacaaaattatgtaagtatgccaaggactcgaagtgattgagaaacttttgaatataaaatgtaatagaagtagaggttcaggaggaaaaagaaaatgacagaacctttacaactgaagatagtgaccttggaacgacagaaaatccattaaccagaaaccgctacgattatacaaccaataatccgttgaattacagtgatccgacaggacattccttgtggagcaggattaagggtgcagctaagaaagcagcaaaaaatataggttctatagaaatagaaggacgatcgatggatatgcaaatgcatgaaatttatagtgaacaaattgcccaacaattaatccaaaaagcatatattccgttacaaggggaagtgacttttgaggacgtaaagaatggatatgaaagatattttaaaaacccaaataaaggaacaattgtagaatatgctatgcacattacatttgataaaaactgtgagtaaagaagcttgcataaaagctaagtaagttatcaataaaattgtgtaatttatttctcatggaaattcatctcctttctgtttacgatgtcattatagaatacgaaaagaattattacttgccaaaataacagaatatatagtcaaaagttgcttaatacagtgacaggttaaaatatcctgcaatactgtcattggtcagtttatttatacaatttaatattggaatattttacaactatgacacaagtatgcaacataataaacgaatgcttttgatagagtaatgatgcacaatatcagttacaaagaagcaggaggatagaaagtggatatgacacaaaacaaatgttgcagacatggggcaagtttacgtcgaaggagacgcaggcacagaaagatactgcgttttatcatattttcctgtggtataatagctgtggctgtatttgtggctgttggaagccgtatgataacatccggcgatggcgggacaaataaaaatgatgttgaagccggaaacaatacatatgataatgctgttatagaaaatagcaaaatctctgaaaagaataatatacaaaataatcagtcgatgcttgatgatataatgaacagcacccaatatccaaaacagctaaaggaccttgctttgaagaatgaagaggcactcgagtttgtgtatgattatccggcggaacatgtgaaggaacacacaattgatttgacagaagaagcgtctatggatagtgttccgttatttgtgcagtgggataaacgctggggatacgaaaaatatagcggcaatttctttgcagcaagcggatgcggtcccactacactttcgatggtagtggtttatctgacacacaacagggatgcatcacctattgcagtagcaaagtattcaaaggaagccggttacagtgtggatggatcgggaagttcatggacgcttataagtgaaggctgcaggcactacggcgtaaaagcaaaggcagtggcgctggatgagagcagaatgaaagcagagcttgatgaaggacatcctattgtggtaaatgtaggaccgggagattttaccgatacaggacattttatggttataacaggctacgatgatgaaggattttcaataaatgatccaaacagcattgaaaaaagtggcaaaaggtggttattcaaaaatatatcatctcagattagagctgtctggagtatgtatgtgtgagaatatatttgtataagtgccggtaaaacatcctattattgagttaaataatagggtgttttttacaactatgacacatctttatgctataataattctatcgtaatcatagaagaggagcagcttatgaccagtattctcatagtggaagatgacaacgacataaataatttaatatgcaacaccctgaaggcagagggatatcaatgcgaaagagcgtttgatggcaaggaaggggcggacaaaattgagcagaacagatatgatctgctgctgcttgatattatgcttcctgagataaatggttatgaattgcttgactatgtcaggggaattggggatactccggtcataataatatctgctatgggacaggtggatgaaaggatacgcgggcttcgtatgggcgcggatgattacatatgcaaaccatttcagataggggagctgcttgcgagagtggaaaccgtattaaggcgcactcagcgcatggcagagcgtctggaaatagaggatgtagctatagatcctaaatcacgtacagtgacaaaggcaggtgagcaggtagagctcacagcaaaggaatttgacctgttgtatgagcttatgaagaataagaatgttgcactcagcaggcgcaggctttatgagcttgtatggcaggaggagtataccggggagacaaggacactggactcacatgtacaaagactaaggaaaaagcttgactggaatcaaaagattgtcacagttttcaggattggctatcgtctggaggttcgcggatgaaatttttctataaaatgtttcttggaatgacagtgatactggctgttgcccttggaatgatagaatatgtgactctatcatattcactggagcatgcagtgaaaagggagcaggacagtgcactttcacagcatcagatgataaaatactcgattgaaactgtcatacttaatatgaagagtgaggatgtggataaggagcttacagatatgatgtcgcagtcggcaaaatccattgttggagatgaaggaggaatgtatcttgctgatgatgatggaaaaaggatatatgccaattcatgtaattatgagcaaaaggatataaaggtaaaggatggtacgcttacatacagtgtagtgttaaaagaaaatactaaagataccggtgaaaagcaaagcagcagatatatccatgtcaaaagcagctttaaactgaatgataacaggtatattctgataacggaaagtgatattacaccggtttttgatgagtcaaaggagcttaggtatagatgcagcatgtactacattgttatatttgctgttggtatgatggtcatattgatactttcttggatgattacaaagcctcttgccggattaacagccacaacaaaaaaatttgcagatggtgattacacagcaagaagtgatgtaaatacaaaggatgaagtaggtgagcttgcgagggctttcaacgagcttgcgaaaaaccttgaaagcaaagtttatgaacttcagatggcggcaaagaagcaggaggattttactgcaaacttcgcacatgagctcaaaaccccaatgacatcaattatcggatatgccgataccctgtatcagaaaaaactgtccgaggatgaggtgcacagtgctgccggagtcatactgaatgagggcatgaggcttgaagcattatcatttaagctgctggagcttatcactcttgataaaaatgatttcaggcttgaagagacaagagtatctgagattatagcagattgtgtggaaaccgcacatgaagcggcaagaaagcataatacagagattgtgtacagtgcggatgagacatgggtgtggctggaatatgatctgtttaagaccatgcttcttaatctgatagacaacgcagtgaaatcaggaggcagcaaggtagatgtatcaggcagacttatttcgcacagtatttatcgtattgcagtttcggacaatggaagaggaataccgcctgaagatatagagcgcattacagaggctttttatatggttgacaagtcacgatcaagaagtgagcatggagcagggcttgggcttgcacttgtatcaaggattgctaagctgcatgatacaaaaatccattatgagagtgagtcaggtaaaggaaccaaggtgtattttgacatgaaagcggaggcattggatgagaagtaagcatttatcagtgcgcaaatgtattgataaaaaaccggataaaatcaagggaatagtgtgtatatgcattattctggcagttgtatgtgcgggaaatatgataccgaattatctgatttcacttaaagcagcaaaaattgccaaaacgagtactacgataagcaacgctgatataagcccctacagccactctatttcagctgaagagaggcttacaaagatgatgtctctgatgcaggacaatgtaaatgagctgtggaatgggaaatatagtgagataagggaaccgttggatactgagattccggtgggacaggcttatacggctattcagacttttctgaagggtgcctgtgagctgcagaagcagtcaggtattatgcagatgctcggtgaagatgatatagttatgctacaaagccttgaaagtaactattcaaaggatacagacagcgaaacagaacagacatatgaagcagctccttggcaatatggtgcagcagttgctttggatgatagctttgacaacacaatatcggattattttgtaacatcggatataagcaaggaattatcggcgtggatatttataatatcatttgaagatacgagaatgctggctgctgttgatgcggtgcttggagtaccgttttatattacatattattgtgcagatgtggatagccctaaggcacaggctgcagtgatgagagatttatatgcaaagacatatggcagtgattattctatgggtgatccaaaagagtctgaatcaaaaatagattcttcctttgagacaaatataatagagaatttttattatgggaatgattatacgcaaggggatgatgaatataccggttttgaaccttatgtatactcttgttcatcggacaagctgcagatggaatatcaggttattacaagaatccaaagatttgaaaaaaagggaaagcaagtgtcatcatataattcgcgtgttaatatatgtctgtactaaccggactaaaaagctctctgtgcaatgcacgggagctttttaaattgcatgcaagcatcaatgataccttttgaccctcatttcataatacagtaattataacagtattattttgtgcatgatttgtacaatttattacattgctctttgcaagggttttgttatatcttagatgtagcaaagcagttattgttcttggttttatatatcaataataggaaagtgaggaaaaatatgaacgctgatatgaaatggcttgataatccggaagtgtttaaggtaaatcaattggaaccacatagtgatcattgctattatctggattattcagacatgaaaaaagaaaaaaatccattattacagtcattaaatggtcaatgggagttcgcttacagcaaaaatgtgatggaaagacctgttgatttttataaggaaacatttgatgcatcaggattcgataaaattatggttccgggacatattgaactggctgggtatgataaaatacgttacatcaacactatgtatccgtgggaaggaaaagagtaccacagaggagcatatagtatggagacaaccggagcagaagagggaatgttctcagaagcacagtacaatccggtaggctcttatatcaaatactttgatttggataagaaaatgtgtggaaaaagaatacatatctgcttcgaaggtgtagaagaagctatgtatctgtggcttaatggtcagtttataggttatgcagaggacagcttcacaccttctgagtttgatctgacaccatatattaaggaaaagggaaatgttctggcagtgcaggtacataagatgagcacggcggcatttttagaggatcaggactttttcagattttttggaattttcagaaatgttactttgaaggcaattccggatgttcatctggaggatgtatggttcaaacctgtgttaaatcaagataatgaaagcggaagcgtatctgtcagcatgaaggtatctgctactgacagtcagaatgtaactgctggctttattttaaaagacagagaagaaaatatattagttgagaagtcattacagttaaataaagaaaacaaccatttggaaggcacgatttgtgttgacttggaaagtgtcaggctgtgggataatcataatccatatttatatcatgcttatgttgagcttaaagcagaggatggttcactggccgaggtaatcccttatgatatcggtttcagaagaatagagattatagataaagtagtatatttgaatggaaaacgtcttgttatcacgggagtaaaccgtcatgagtggaatgcaagaacaggaagatgcattggtatagaagacatgaaggcagatatatcatgtatattaagaaacaatattaattctgtgcgtacctgtcactatcctgaccagataccatggtactatatgtgcgacgatgcaggtatttatgtgatggcagaaacaaatctggagagccatggctcattccaaaaactaggggcaatcgaaccgtcatgcaatgtacctggatctattccacagtggagagatgcagtgcttgagcgtgcaaaaaacaattttgaaacttttaaaaaccatacatccatccttttctggtcattaggaaatgaatcctatgcaggagacgacattgaggcaatgaacgtttattttgccgaaaagaaggatggaagattagttcattatgaaagcgcttattataatagggcatatgaggatactatttctgattttgagaccagaatgtatgcaaaaccggaggatgtagaggaatacttgaataacagtccgaaaaaaccgtatattttatgcgaattcatgcatgatatgggaaattcaatgggtggacttggctcttatatgaagctgattgacaaatacgatatgtatcatggcggatttatatgggattttattgaccaggcaattatggtaaaagatcccgttacaggaaaagacgttttacgctatggtggagattttgatgataaaccggcagactatgaattctcagcaaatggaattgtatttgctgacaggaaagaaaaaccggcaatgcaggaagtgaggtattactatggcttatacagataaattaagagtggtctatggtgactatacattaggtgtacatggtgaaggctttgattatattttctcttatgcacagggtggactggaatctatcgttaaaaatggatatgagtggctgtatcgttgcccaaagcctactttctggagagcgttgacagataatgacaggggaagcaagttccatattaaaagcggaagctggctttcggcagatatgtttattgactgtaagggaatacaggtgatcatggatggcaaggagcaaaaaccatatgcacctgataataacagctatggcggtgatgtttatgctgatgaaattattgtaaaatatacatacgagaccataacaactccggcgacaactgttcttgtgagctatagcgttgatgcgtccggaaagattcgcgtggatgtacattataatggagtacaggggctccctgaattccctgtatttggaatgagatttattatgccaacattggctgacaaatatttatataagggactctccggggaaacatatcctgacagaaaagcaggtgcacaagaaggcgtctatgagatcggtgatctgagtcttacacaatatcttgttccgcaggaatgtggtatgagaatggatacagagtggcttgaaattacaagacatacggctcttgataacagcaggacagatagctcgtcacagacactgcgcattgaaaagaatgatgaaaaatttgcattttcttgtctgccttataccgcatctgagattgaaaacgctcttcaccatgaagaactgccaccggcaagaagaactgttttatgcatatatggcgcagtaagaggtgttggaggtatcgacagctggggaacagatgtggaagaggattatcgtatcagtgcggagactgataaggattattcttttacaatctgttagtcattcattaaaaagataagtatccggataaagcaggagcatttgctcctgcttttgtctttttattatgtatttctggctctgtattcagaaggagaacatcctttttgtttatggaacaatcgactgaagtatagtggattattgtatccgacaatgcctgcaatctcgtttatagagtatgatgtcgtttcgagcaacacctgagcatttgtcatcctgagtgatgtgataaattgtattggtgtactacctgtgtattttttaaagcttcgaataaaccagcttatgctcataccaattgatgaagcatattcctccacgttaatagcgcggttgtagtttgtattgaaatatgtaatggctgtatccatctggctgtcaaggaattcatttctgattacatgctcagttgttattttacggttaaatataatcaaaaggtgtcgtagcaaaagcatgagcatttcctcataattgtcctgacatctttgaagctctgtaataatccttttgaaaacctgttcatattcaagagacgttccaacattaaagactcttttattgtctgtaaatccgtattttcttaaagtgttttttacgtcgcttccggtaaagtgaagccaatatatctgagtcttatccttaccataaaattcatatttttgaagctcttttgggcgaaataacactatatgtcctgctggaatgattgtctcattttcaggattgtcaaagtggaaatgaacaagaccggatgatatgtatataatctggtaatccagtcttcctctgggcctgtatgtaggcatcttaggatgctgtgacaggcgataggtcccgcagcttcctacaatcagagggcggcttttatctttaaaatctttatgtgaatgattcaaatatcccgtgttaatatacattatacacctccattcgaattatagcattttatgcatgctttgtctatttgcatttatggacaaaatgtttagagcatgatattgtgtattgattacgtttcaaatggaattgagtcaaatagctgtgaaactgtagtgtttgaaaagtatcattttgtgcatattacagcctattatgtttatagacaaaatttgcacaaatatataaaattagtatagctgttaaagataaaacaaagtaattaattggaggtttttcatggaagaaaagacgtacttaaagtggtacaacaaaattggttatggttccggtgatattgcaggaaatgtagtatatgcattcctgacatcctttgttatggtatatcttacagatactataggacttgcatcaggaatcgttggaacattaatcgcagcatctaaattatttgatggttttacagatattttctttgggtcacttattgataaaacacatacaaagcttggaaaagcaaggccatggatgatttatggctatataggttgtgctttgacacttgtagcagtttttgcaattcctacaagctggggcaggactgctcagtatgcatggttctttatagcatatacattattgaatggtgtattttatacagcaaataatattgcatattctgcacttacttcgctggttacaaagaacagcaaagagcgtgtacagatgggctcttaccgttttatttttgccttttcaaccagtctgataattcagtctataacagttgcatttgttgatgtatgcggtggaggtgctgctgcatggagagtcgtagctattatttatgctttgataggtcttgtagtaaatacgatttcaggattgtcggttaaggagcttccggaagaggagcttaactccggaatagagaacgatggagaaaagaagtatggtcttgttcaggcatttaagctacttgttaagaataagtactatatgatgatttgtggaacttatattttgcagcagttatacagtgctatgattggggcaggtatttattattgtacatgggttcttaagaataaaaatctgtttggtgtatttgcgtgggctgtaaatattcctcttataatagcacttattttcacaccaactcttgttggaaagtggaaaggaatgtataagcttaataaacgtggatatattctggctacgatagcaagagcacttgtgattgtagcaggatacatgggaagcgttccactgatgatgctgtttactgcagttgcagcattaggacagggaccttggcagggagacatgaatgcagtaattgccgagtgctctgagtatacttacctgactcagggaaagagagtagatggaactatgtattcatgcacatcacttggaatcaaaattggtggtggaattggaacagctattgtaggatggctgcttgaaatcagtggttatgtaggtacaaatgcgactcagccgacatctgcaattactatgcttcaggtaatgtatttatggttaccgtttgtatttgagattcttattacaattcttctttcaaagatgaatgtagaagctgcaaatgaaaagcttagaagagaaaaaggaattgaataattatcgtataatatgggagagatgatctgagtgcatttaacgtatgaaaacacaaatgaagagattattgcagtaaagcggaagccacggcaccagccaccacatctgcataatgcaatggaaattgtatgcgttacgaaaggaacattagagcttggtgtaggacaggagctgtatcacatggaaacaggtgatataggagtagtatttcctgatgttatacatcattatcaggtgttttcatcagaagtcaatgaggcggtttttattaatgctccacaaatgatttttggtagatttgaaaatgtactgcggaataaggctccacaatatcctgttgtaaaaagtgatgttattccggatgaagtgtacagagcagtggaatccataatagataccaagcagaatgatatatgggttgttcaagcttatttacagattatactagcaagatgtattccgatgatgaaattggtggaaaagagcaaaattggcagcgatgatataatataccgtaccgtatcatatatttctgccaattttaataagagtatatcgcttgatggaatggcacatgaccttggcgtgagcaaattttcattatccagattgttttcaaagacatttcacagcagttttaatcaatatgtgaatgaggcgcgtctggggtatgcctgtcagagaattgaaactacagatgataccctgacagaaatctcgatggacagtggttttggaagtcttagaacctttaatcgtgtttttaaagaaaaatatagattgacaccaagcgagtatagaaataaattacaaaaatgatagaacattccattattgagtttaagtaatttctaatgtaatttaatggtgtatgcattacttagtgggtatggcatacaccatttttattggagtcaaattattcataaatcgtattatttcaagtaaagtaatttcaaattgcggatttgcaaggtcaagttggtagatgttatgaatgaaaaaatgtattataataatacataaatatagagggaggagatgcaagatatgacatttgctgaaaaattacagaagttaagaaaacaaaatggattatcacaggaacaactggcagaaaaactgaatgtatccagacaggctgtttctaaatgggagatgggaacaattcctgatatggagaatatggttaagcttggaagatactttgactgctcattggattatcttatgaatgatgatattgataccaatgcaaaaagtcatcaaagtcctaaaatagagaataaaaatttagcttggaaatgtgttgcgacagggcttattattacaggtttaatactttctttgttgatgccattgtttgcaaaaatgtatcagggatttgaattttcgaattttcatcagtgttttactgattcgtggagatatatttttaaattcccattactggggattttgttgatagcattgttatgtttgtttacaggaatagtattatttttaatgaagagatataagggtacatcgtaagatggaagcaccagagactcaggggaacggcaggaagtacaaaggcaaagctcgttgcagaagctgatacaaatgtcgtgttaacacgacaaaattgtctcgtaaacacggtcggcaattcatccgtgacaatatacaataaaatggttggtgctacagtagcagttgccgtttccatcgaataggctgctgatgagggcaaattctaaatagaaagcttgattttataggcttttttgagactcatatcatttatggtatggagagccgataaaataaggctttgcggacatttgagaagatataaaaagatagttaaaaagacatatataatttagagtaactctttcatacctatcactactatatcattagtaagtcatttcgtaaagttttgtttttactaattttgttctttttgtgtattttatgaatatatattttattttatagcgtcgagtgcgtttgagatatctgcaatcaaatccaccttgtcctcaagacctaagcttattctgataagctctgccggcactcctgcttccttaagctgctcatcattcatctgacgatgcgtgcttgttgccggatttaagcagcaggttctcgcatctgccacatgtgtctcgattgcaccaagccttaatgccttcataaatgcagacgctgcctctctgccgccctttaagccaaatgatacgactccgcagcctccgtttggaagatacttctgtgctctctcatagtatttgtttgaaggaagccctgagtagtttacataggcaacctttggatgattttccaaaaattcagccactgcctgtccattttccacatgctttggcatacgcacatgaagtgactcaaggccaagattcagcataaatgcattctgtggtgactgcatagaaccaaaatcgcgcataagctgtgctgtacatttggtgatgaacgcaccttccttgccgaatttctctgcatatgtgatgccatgatagctgtcgtcaggtgtgcacagtcccggatatttatctgcatgtgccatccagtcgaatttgccgctgtctacgattgctccgccgagtgtggctccgtgtccgtccatgtactttgtggtagagtgtgtgacaatatctgcgccccactcaattggtctgcagtttacaggtgtcgggaaggtattgtccactataagcggtactccgtgctcgtgtgccacctttgcaaaaagctctatatcaagcaccgtaagcgcaggattggcaatagtctcaccaaacataagctttgtgttcggtctgaatgctgcattcagctcctcctctgtagcatcaggagatacgaatgtagctgtaatacccatctttgccatagttaccgcgatgaggttgaaggtgcctccatagatggatgatgatgccacgatatggtctccgcactcacatatgttgaacatggcatagaaattggctgcctgtcctgatgatgtgagcatggcagcagtgccaccctccatagctgcgatttttcttgctaccgtgtcacaggtcggattctgcagtctgctgtagaaatagccctctgcctcaaggtcaaaaagctttcccatgtcctcgcttgtgtcatatttgaatgtagttgactgaataatcggaatctgtctcggctctccgtttccggctgcatagcctgcctgtacacactttgtacctatactgtattctttcattgtgcttctcctttattatgttaatgtttcagttggatatagtatattacatttggcgcgttttgacaaattcagattatataacttttgtcatcataaattcttaagctttataacatattgtatctaccagtgcttcatagctgctgtcatcagcttgcagtatctctctgacattgtgctgctctaatgctgctgttgttttttcacctatcgagtatgctgtttccacgtatgcattctccggcagcatatgaaaaaatctttccacatttgatgcgcttgtaaaaacagcttcacttaccatgtttccaatgctttcaggaatactctcatatgcctgctcatttacatatgcatcaattttttctaattcacatatttctttaagacctgcctcaaggtcaggtgaagcctcctttgccgagaaaatgcagactttgcacattttatcagatatattaccattgcttaaatacaatgtactttttttccctaaatcaaatatatcctcatcactttccccatagacatacggcatacataatttcattgcatctgcaagtccttttccggtctgttctgccggaataatatctgcctttatgtgatgctttgcaagctctttttctgtagcttttcccaccactgcaaaccttacacttgctataagcctgatgtcagcccctgccagctccagattatagaaaaatgatcttacaccatttttgcttgtaaaaactatccagtcagccgatcttaccttatcggcaaatttaggaattattatcgggtttattatgcctgtcttaaccggtgtgacatctgctccaagctgctgtaattttgctatcaatccgtttgttttgatatacggtactgtgatttttcttctaaacagcggtcttttttcaaagaaatcaagcctgtcattcagtgaaaccacatcccccacaacgattatagccggtgatgtcagctttgcttcctcgattttttctccgatatccgcaagcgttcctatacatttgcgctgcgcagcaagtgtgccgttcgatatcactgctgccggagtatccgatcttcgtcctgctttcataagccctgctgcaatgctttttacatgcgcaagtcccatcaaaaatacacaggtgattgtctcatctgtaaggagggaatagtctatatctgcctcctcatcctttctgctgtgcgcagtgatgacctgaaagccttttgctatgcctctgtgtgtgataggtattcctgcagccgcaagcgctgcaaccgatgaactgacacccggtaccacttctacctccacatttctatctaccagatagagagcttcctctccgcctcttccaaatacatacggatctccgccctttaaacggactacaagctcatgatattttgatttctcgtacaaaagctcgtttatggcatcctgcttcatgacatgcttgtgattttccttgcccacataaataagctcacagcctgcctttgccattgaaagaaactctggtgatgacagcctgtcatacaccagacaatccgcctgttttatatatttttctccttttaaagtgagcaggcccgtatctcccggtcctgctccaactaatactacttttcctgtgttttctctcatgattttcctaattatttttctactgaattattatgattaaaaattatgacttgatatttttttagtcgatttctaatttataccgaatatcgtgcaccgcacgctccacaatattgtttctgtctgatgtcatatcccatatctgctctgtccttgcaagctgttttccatcttctgagccaaacatcgcaagaagctttagcctgttatttttgttgctgtcattaccgcggtctttttcacttacaatatcacagtatgcagccacaggcagatgacagtttccaccgattcgctttaaaaattctctctcaatgcctgcgcacagattggttttctcatctgacaaagcatctagctttgccatcagcttagcattgtcagcacgtagctcaagcgccagtgtgccctgtgccggagccggaatcatatcatcctctgaaaagtactgtgtgatctcagaatctcttccgatacgctttattcccgccgctgcaagtacgattccatccagcctatattcgctatacttattctgtttttcgttagctatctcattgttatttacagtattatcggcaacctcttcatatataatttcaccatcatatagcttacgaagcctcgtatcgatatttccgcgtatgccaaccaccttaaggtcaggacgcagctttaaaagctgatactttctgcgcttgcttccggttcctatcacggcaccatgaggaagctcatccagtgaagcggcattttttagcaccaaaacatcccttggatcttcacgcttccatgcctttgcaaatgtaagccctgctgccggttcatcaggcatatccttcatggaatggactgccatatgaatctttcccgataaaagctcgtcctctatctcctttacgaagataccctttgagccaatcttatcgagtgcctttttctgctctaaatcgcctgttgtctttatgataacagccttaaaatcatcatccggatatgctctttttaacttatctatcacgtaatcagtctgaacaagagcaagctttgagcctctcgttcctattaaatacctcattttactctcctacggatcatgccattttccatttataatttataaatgaacaacaacttaaaatctgcaataccatactttaaactatatttccggaatccttccattatcaatagctgcacacaacatttctttaaatacacgccttctctcggcttccgtgtcatattgcgctattactttttcgcggatctgtcccatgtattcgttcagctcaccaagaaacggagtaagaatctcctgttctttgcatttcagatactgagtcagcacagggctgtttcctccgctcgaaaatgccgcaacaagattcttttcctttatgtatgacggaaaaataaagctgcaatcagccttctgatcgaccgcatttaccatgatgttcttagctttgcaatactctgcaatctcatgatttaaagcattgtcatcagtggcagcgataaccatttccatgccgtcacagtctttttgattaaactttctttttataatcgtaattctgtcagctgcatctgaatccgtcttattgttttctatatttgccgtatatgagcccgttttatcctcgcttgctatatcatcaattgtaagctttctcagctcatcacatatatcctctgccacaaccgtgaccttcgcgccaaaatccagcattacgatcaccttgcggtatgccacatttccaccgccaacgatcaggcactctctttccgtcatatccacaaacatcggaaaatacgccatttttatctccctgtaataccatatccatactttatttcatatatatttcatgccttattttatactttattatacgctttatgctttattttttgccttatgcttcacactgtatccattgagcattccttcaaaaacaggacgaagcttagcagaaaacactgctgccgatacgcataatataaagtccggtgcaacagttatcagacagtaatccactattactatgccccagctgacaggtgttgccgcatagaaattcttcatgcagtaaaagtatattgctccaactgtataatatgccaccagtccgaccgttgccggaagaatgagtgtaaacgcattggtctttttaagcttttctgtgatggctccgattaaaaatgctgcaagcacaaagcctaagaggaacccaaagcccggtcttaaaatatatgtaggaccaccgcctgccgcaaatacaggcactcccaccagtccgatgcacagatacactatcacgctaagcgatgccagctttgcccccagcagaaatcccgccatcagcacaaagaaccactgtaatgtaaaatgcatggtgtacataggaagtggaatatcaatcttgataaatgctccaactgctataagtgccgcaaaaagtgcacatgttgtaagttccttcgtttttaatttcattttcgcgcgctctttcgttttattaaatatacatgctataataacatctttctctaaaaaagaaaagccatcttcgatgaagctgacttttctttgcagctttcgctgcgactcaaaacattaacatatgatttagaagtaatattcatcagaatatattcgtaaatcctctttcgtgacctgtcctccctcgatatgaaacgagttgattacaggattttctgccataagcgacattatcatgtagctcgcacttggatcgtatgcaagctttatatcctcatccgatggccttgaagggctagacgggtgtgaatgccagttgccaagcggcttaagaccgtttgctctcatgtcctttatggctgccagctgctcctttggatccattgtgaaatggtcctcggcatggtctgtattcgtcaggtaatatacctttgtgatgagacgaccgttttcgtcctcactgcctgctatcagaccgcacgcctcctccggcagatgctctctagcatattttgctatttcatccagaaacggatatttcattcttatgatactcatatcgttcctttccttactgtctttttattcctgtgtacgaggtgcatcaaatctgcccgctgtctcctcgcagacctcctgctcgtagtcgattggctcgagaatagtcggatggtcgccacagactgcacagttgtgtgtatccttcggaagcttaatcttgtggaactccatggtgagtgcatcatatgtaagcagatatcctgtcagcagctctccaacaccgattaaatacttgatagcctccatagcctgaagcgaaccgattactccgcccatagctccgataacgcctgcctgcttacatgtaggcactgcatcctttggtggcggattcttgaatacacatctgtagcaaggtccctctcccggcacatatgtcatgagctgacccttgaaacggatgattcctgcatgtgaaaacggctttttctcaagcacacatgcatcgttgattaagaactttgccgggaaattgtcagttccatctatgatgaaatcataatccctgataagctctctgatgtttgacgcatctacaaacatacggtatgtattgacctgaacatccgggttcatggcgttcattgtctcttttgctgactttaccttggcttttcccacatcggctgttccgtggataatctgtctctgcaggttggataaatctacctcatccgcatccacaataccgattgtgccaactcctgctgctgcaagatacatggctgccggagctccaagtccgccggcaccgataataagcaccttgccctttaataatttcttctgacctttaacgcccacctcattaaggataatgtggcgtgaatagcgctcgatctgctcatcagtcattgccattagcatccacctcccatgaagtaaaggaactctacattgtcgccatccttaagcactgtctttggcttatcctctgtggcaacaaattcctcatttattgaaactgttacatactcaggcatatctacattctcaagctcgataagctccggtaatgtaagtccatccttatattctttcttctctcctgctactgtgatagtcattttatttcctcctgtgtcacagattgtggtatctgtatgtgttattatcctgtatcagactgctttatataataatctaaaaactataataattcttcaacccatgctttcaaatcggcaggcttttgtgcgccgacctttctgtctaagacctctgcgttttttacaaaaagcagtgtcgggtttgcagtcacctcatactcatcagcgagctctccgtcaaagtttgtgttgaccttgtatacgtgaagcttatcctcataatcatcctcgatatctccgagaaccggtgccagcttcttgcaggccacacatgaatccgagtaaaaatcaacaattaccggaagcttgctttttaatactttttcatcgaaatccgcctttgaaattcttgctgccatgattagtcctcaacctttctcacgtaaagagtgtatgttccatcctcgttgtcctcgagcttaagtatcttgtgtccctcttccttcatgcttcttggaacattctgtaccggctctccatcattcatacggattgcaagcacctcaccgtcatctaattcctctattgctacctttgcctttacaaatgtaagagggcaaaccttgtcagttatatctacctgatcgtcgaatgctatatctgccattttgcatctcccttcctatactcatatttattatatttttgccgtaaccgttgttgtttatgcatgccggatattttctgctatacatggggattatttaccctcgtatgctgcctgaatctcttttttgaactcttcctcgcccactctctgaagagtaagtctgaaacgctcaccaccgtttgcatgcttctcgaagaaactaattgctgcatctgtcactctgaaaagagtttccttgtcgcggataatcgggactagctgctctcctttatagatgtggtttccgaaaagtcctccaaacgatacgatatatcccggagttcccttccatgcatctgtcggacagctctttacgcagcgcgcacagttgttacatttgtctctgtcgatgacaatcctgccatcctccatgctaagtgcaccctcgcggcatgccttcacacatacaccacactggatacaatcgtcatggctgcactctactgtcattccgcccttgattccgacatcgttttcctcagcctttaagcagttgttctgacagcctgtgacaccaaacttgaacttgtgaggaagctctcttccgaagtatctttcatcaagttccttagccagagtgtatgtatcgatacatccgctaggacagatttctgagccctgacacgctgtgacagtacgtactctcggtccgcagacacctgttcctacaccgccctttgccagttcctcttttaccacattgatatcctcaaccttgataaaaggaatctcaataccctgacgcgatgtcatatgaacatatccgtgtccgtatttctcagcaacctctgctactgttttgatattttctgctgtaagatttcctcctacaaccgcaattctaagcgagaaacagcccttttgcttctgtctcatgaaaccgcccttttttagggccgcgtaatcaactttctccgccatttttaatctccttactgtgtaaatatgttaatgttttgttttatatgtaaatgcatatgcacgctctcatttgcatacacattgataccttattacgatggcttaatcagctatatttgcaaaagcctgtgcaaaatcctccttgaggtcatctatatcctcgatacccacgctgactcttataagatcctcaaatactcctgcatcctccttctgcttatctgtgctgtgaagactgattgtggagcccggatgaatgacaagtgtctttgtatctccgatattgctgagtgtgtatggaatcgtcaggctgtctataaatttaaatgccttttccttgctgccaaccctgattgtaaggattgctccatagccgtttgtgagctgtttttttgctatttcatgccatttgctgctacaaagccccggataattaacctttatgtcaggataattgttttctatccacgacgcaagctcgagtgcattagaacattctctttccattctaagaccgagtgtctcaagtcctataatatttaagtatgcattcaccggagctaaacaggcacccatatttctgaaaagactgtttctcagctttgcgacaaatgccataggtccatacttcacataatctgcaaaccctgggtatctgttcttgtcccatttgaacttacctgagtctgtcagaataccactgattgcattgctgcttccattgatatatttggaagatgaattgaccacgatatcagctccatgctttaaaacctgtatcaggtaagctgtcgatgtggtattgtcaactacaagcggtatatcatgtgcgtgtgctatctctgcaagcttctcaatatctgtgacatccagacagggattaccgatagtctctgcaaaaatcagtctggtatgctcattgatgctgtcctctatctgctgccagttgttgttctcgacatatctggttgtgatgccgaaggcctcaagatcatggaacaaatctattgtgccaccatagaggctggcgcttgagatgagctcatctccactgcttagtatatttaagaaggtattcatcagtgccgccatgcctgatgcgcatgccaccgatgctattcctccctcgagctttgttattctgttctcaaaagctgtaatcgtaggattggcaactcttgtgtaacagtagcccggagctttgttttcaaatattttttccagatctgccgcgctctcctgctcgaaggcgcttgtctgatataccggtggcagtgtagagccatttgtctcttttgtcacgccggcatgaagtaagcttgtattaaatctcattgttttcttcttctcgttaattcttacatagtctattgtgttactaggaattgatgagattattatacaaacgtgtgtgttgaaagtcaatgctatcagttatacaaattatttgtgcgtggttatatattttatttatatccattaatgtcccttaaatactctgcggctgtcgttgcggcatttgctccgtcagatactgcggttaccacctgacgcagtgtcttggtacggacatctcccgccacatacagtcccggctggacgcttctatcatggtcaccattttttgttgcagcatatgtgatgccgtcctcacctgccactacatatcctctctcatcaagctgcaccagattctttataagctctgactgcggtactgagccatatgccacgaatactccgtctacagccagtgtcctgccacttttaagctttatgcctgttggctttttttctccatatatttctgtcactgtttcgtttaggacaagctctacattttctttctgctttaagagctcaactgtgctctgtgcacctcggaagctgtctcttctgtgaaccagatagaccttctcacatatatcggacagatataatgcatcatccaaagcggtatctccgccgcccagcactgcggctgtctttcctttatagaatgctccgtcacagattgcacagtaagatactccctttccggtatactcatcctctcccggcactcctgcctttctcggatatgctcctgcggtatagatgagcgctcttgcctctgctatcgtgtcatcatcgaatttcactctgtatatcactgattcttctttctcaccattttgcactgcttctatctgcactgcttctttttcgataaattctacatcaagagacactgcatgctccctgaatttttctcccaggtcatatccgtttatgtttggaagccccagatagttgttcacatttccgctctcggctatctggcctgtcccctcgtattctttttctgctactgccacattcagattggctctctttgcatatattgctgcagacagtcctgccggaccactgcctattattattatatcaaacatggaattggttcctttcatcgtccattgaattttttcggtaacttattatatacattatccttaaaaaatacaataataccgcctgcttttataaaacacctttataaaaacaagcggtatcaattttatctatcgtatatacatcctggcctcataaggtctgagcactgacatatcagaggtatccttataatttgaaatcagcacctccatgccctcacactcctttgcaagcggcattggtatctccttgtcaaagaaattgcacacaacaatcatggttttttcttcattctttctgctgtatgcaaaaatattctcatcatcctcaagtaaaagtgtgaatttaccatcaacaaataccggataatcctttctcagctgaacaagcttcttgtagcagctaaagattgaatcagggtcatccacctgtgatttggcatttattttgtcgtaattgtcatttacctttatccaaggtgttcctgtggtgaagccggcatttgccgagtcatcccactgcataggtgtccttgcattgtcacggccctttgcgtaaatggacttcatgatttcatcctttgagtatcctttttcaaggcgctcatggtacatgtttatgatttcacagtccttataatcctcgatatcatactgtacatttgtcatgcccagctcctcgccctgatagatgtatggtgtaccctgcatgccgtgcagcaatatagcaagcatctttgcagattccactctgtactccctgtcattgccccatcttgacacgatacgcggcaggtcatgattgtcccagaacagactgttccagccacagttgtagagctcattctgccagtgagcaattatctttttgagctttttaaaaggaagcggtgcaaggtcccatttctcgccgccctccttctggtcaagccctatgtgctcaaactggaacaccatagaaaactcgctgccatccggattgctgtaaagctttgcgcgctctgtgtctgcgccccatgcctcacccacggtaatcaagtcgcccttctggaatgtctccctgctcagttccttaaaatattcctgaagccttggtccgtttatggtgattctcttgtccggctcttttgctatctggtcgattacatcaagtctgaagccgccgactcccttgtccatccaccagagaatcatatcgtagattgctcttctgacctttggattctcccagtttaaatccggctgctccggtaaaaactgatggaaataatactgtccgatttccggcacatattcccatgcgcttccaccgaaacaagccttcatatcacttggcggcacgccttcatctccgtctctccaaatatagtagtcatggtatggattgtccttgctctttttagcctccttgaaccacctgtgctcgtttgaggaatgatttaagacaagatccatcataatccttatattgtgcttctttgcctcgtttatgagctcctccatatcatcgagactgccaaacgtcggatcaatatccctgtaatccgaaatgtcataaccgttgtccgcctgcggtgatttgaataccggtgaaagccatattgcattgattccaagcgtctcaagataatcaagtcttttgatgataccctgtaaatcaccaaagccgtctccgttagaatcctgaaagctctttggataaatctggtaaactaccgcctttttccaccatttttcattattgtttttgctcattatgccctccttgtctcttcattatctctttttggtatctcttttagctgtctctttttgtaaaaattcagcctggtttctttaatgctgtatcaaattatgctattttacaagcaccaccaaaacctcacagctttcaagcttaagctcggatgctcccactgaaacagtgctcttttcagcatcatttgtgttggacaaaagcacctttttcacactgccatcaagcctgatttgtgcctctttactgccaaaatttgccacaaccagcacgcgcttattttcatcctctctgtaataagccatgatgccatctgtatcctcatatgccggaacacatctgccgtaggtgaacagctccttaaattcatctgactttcgcagtgccacaagccttctgtaatagttcaaaacagatgaaggatccttttcctgcgccgcaacattgatagccttatagttttcattgaccttaagccatggctttgctgtggtaaaaccggcatttgcctcatcactccactgcataggtgtccttgcattatccctgctcatccttccacaggctgcaagtgcctgctcctttgataagcctgctgcaagtgctgccttgtactgatcctttgtgctgatatcgtcatactcatctatactgttccattttgcattttgcataccgatttcctgtccctggtatataaacggaatgcctcgaagcagtacgctgacagttcctaacatctttattccggcaggattttgagcatgctttggtaaaaatcttgaggcacctctcggctcatcatgattttctataatattggccttgaagccgtacttttctgtctcaagctgtgaaccaagaatggactttctccatttgtcaaaatctattttcggtgcatcataccatccatgctctccatcacttaagcactgtgcacaaaaatcaaatatcgttgaaaaatgcccattctcaccgataaactccggcagctcctcaggcttcatattgaatacctcgccaaccgtaaatgcatcatacttcttaaatgtattgttctttaattcctctaagagctctccgacaccttctgcactttcaaccatcttgtagcaggcagccagtccgtcctctgcatccggctcaaaatcagggaaatcgagatttttctttatattgattatcgcatctattctaaatcctgacaagcccttatcaagccaccagttaatcatctcataaagcttttgtcttagcttttcattctcccagtttaaatccggctgctccttcgcaaacatgtgcagataatacttgtccgtgcccggcaccttctcccagcagcttccgccaaaataagagcggtaattgctcggcggattgccgtttttaccttttctgaaataaaagtaatcagcatactctccatccggatccttaagtgccttttgaaaccattcgtgcttatccgagcagtgatttattaccagatccatgatgatgtgcatatcacgcttctttgcctcggcaaggagctcatcaaactcctccatagtaccgaactcttcagctatcgcatagtaatcagatatgtcatagccctgatccacaaatggcgatttatatatcggagacagccatatgatgtcaattccaagcgattttaaataatccagctttgaaatgatacctcttaaatctcctattccgtcaccgtttgtatccagaaagctctttggataaatctgatatgccaccttgtcatgccaccattttctctccataatgtgtacctcttatctaatcataaattttgctctcatttacatcttgagcactttgtcttgatgtattatactgctattatagaaagtgattagtataaattcttgcaatattttttcattttataacacaatactgctcttataattttaaagggtatatttttaaaagctatggagaaacaacaatatgaaaaacaataatccgcctgccctcgggcagaaagaaaacgcaaagcacggagaagtatttttccccgttcagaaatatataacaagacttgcagcagattaccctgtcatcactacacactggcacgatgaggcagaactcacactgattacaaagggctcatgcacctatcagattgatttgctcgaatatgaagcaaaggaaggcgatatcatctttatcccgccactgctgctgcattccatttcaataagggactgcgacgaattttactcggaaacgtatgtattccatatcaattttttaggtggaaacaataccgatatatgctcttcaagatatctgactccgctaatcaaccatgagtttgccatgccttacctgattgcaccgaagcatccggcatattcatccctttgcaaatgcttcatgcgcataacaaagctatactccagtcaggaattcggctatgagctggctctaaaggcatttctgcttcaggcaatatttctattgctgcaatacagtgaaaaaaatgctgatttcggtgtcaacacatcctccgataagctcaaaaatgtgctcgattacatcgaggtgcactatgccgaaagcatccaggttgcagagcttgccgggctttgctatttcagtgaataccacttcatgcgtttcttcaaaaaacacatgaacatgacctgcgtgcagtatatcaacaatgtgcgtcttgaaaaatccgtggaacagttcgagcgcggcaacacctcaattttagatgtctcactgtctgtcggatttcacaatctgagctattttcacagggcatttaaaaagaggtatcatatgacacctctttcctttatcaaaagccttgaataaatatttatttgcacgcaatcactctgagtatatactcatatgacctctttgcagaggatatggaaagcctctcctcagtcgtatggatatcatacatgtccggtcccattgatatgcagtcgagtccttcaatcttgccgcttaaaagtccgcactcaacaccggcatgaatagcctcaactgtaggctttttgccatacatctcctcaaaaatccgtaccatatcctcgcgaagctttgaatccttcttgtactcccatgcaggataatcgccctcaaatgtaacctctgcagcaaaagcgcctgctatgcagacaagctgattcttaaggctctttttagccacaccgacagagcttctgactgcgtatcttaaagtgacagcagcatcgtctgattttaaaactcccagattaagtgaagtctcaacaagcttatctatttcacggctcattctgatgatgccgtttggcagtgcctcgataagtgcgataacccttgcgctgtcctttgcacttatagctgactcactgcagtcagtctcctctgacacagcaagcttaaggtcaggatcagatgccttaaactcctccgcaatctcagctgctgcctgttctatcgaagccttcactgccgcagcctcatcaggtgctacaataatctgtgcagtacactctcttggaatggcattatcctttctgccgccatctatagaagctatagctacaggtgccgatgcgtcgcgaagcagtctggacataagagtattggcattgccccttcccttatcaatctctgagcctgagtgtccgccggtgagacctgataagctcacagtgagctttgttccgctcacagtctctctctctacaggcagcttcacatcggctctgcatccaccggcgcagcttgcgagcatcacgccctcctcctcgctgtccatattaagaagcttctttcccttaagcatagacacatcgatgcctgtagcaccctccatgccgacctcctcgcatacagtgcatacaaactcaaggcgtggatgtgacaggctgtcatcgtccaaaatagcaagcgcatatgccaccgcgataccgtcatctccaccgagtgtagtgccctttgccgagataaaatcaccatctatcaaaaggtccaggccttcctcgtccatatccttatcacagtcaggtgtcttctcgcaaaccatatccatgtgcccctgcagtatgattggctccacatcctcatatccttctgatgcttcctttatgattatcacattgtgaagctcatcctggtaatgctcaaggcctcttgcctttgcaaactccaccagataattactgattttttcttccttgtatgatggatgaggaatactgcatatatcctcgaaaaacgaaaaaacgttctttggctctaaatctgttaatactctcattttactctccttaaaaaaagtctgccgacgaatccgccgacagacatattataacacaatccgttatttaattgtatatgtattattcaagtccaaatcttctctttacggcatcgaccagatagtcggctgtcccttctgtaccgagcatgctgctgtcctctccacttacctcttccgcaagcttcctaaccttacctgcatccgcacactgatagcagttcttcatcgcttcatcatacgagaaatctactgcattacccgctgctgtcacatcacacttccatgagccacacgagctgtgcacctgcgtaatacctgtgtattcgataagtgctctcgcattggtatcattcacgccgcttccggccagaatagtaatatcttttccatattgattttgaagatgcttaagctgttttctgccatcccatacatttactgctccaccgcttgtgaggatacgatctgcgccaagcctaataagcttctccgctgcactatcctggttatctatgcagtcaaaggcgcggtgaaacacagcttccctgccatactcatgaatgagctctatcatttccttcgtgcgctttttgtccagcattttttcttctgtcaaaaatccaaacgcaataccgtctgctccatgctctaaaagaatttttgcatccataagcatagtgtcgtattcttcatccgaatagcaaaatccgccgccccttggacgaaccattgccactaccggtatattgcatttttcccttgcatatattaaattggcgagtgtaggtgtcagccctcccatatatagggcactgttcagttcaaccctgtctgcaccattttcatatgctgttttcacatccgaaaagctgccacagcagatttcaagcaccagtttatttatttctttgcctctcattttctccccctcatcctcaaagcatataaaaattatatcatacgttgcgcactttgtattgttaacatttctaagatttctaaaaatcatgtttatttgccattatttcaaactcatgttacaatacttttgtccggattaatggtgattattatcagacactttttagtagacagcgaaaatgtcaacgacaactggctgatgctgtttgatatggcagatgaggacgacgaaatcgtagttttttacacaaaaaaatcacctcacatgtcatacatgtcagtcatcaggcttatggaaaacaacagtattaatgtacgatttgaggaatgctatgagggaacgaatgccctcgattttcagctggtatcctatatgggttatctgattggacacaatgattccctcagtgaaagcacatgtgaacatgcatcaggcaacactgaaatacaagataacacaaagccatataatgataattcttcagctactcatatcgttgcaaacacagaagatgtatcagcagcctcatgtgctgatgagtacatcataatgagcaatgacacaggctatgaccctgctgtaaggttctggaaagataagggattcgctgtacgcagattcaatgtaaatttctgcaaacaggctgtccagcgaagaaaaaacatcaagtatcaggtagtagcagatattccatccaaggaagataacgtcaataacaataccaatatcaataccgatactgataccgatgctatcaccgcaaagtcttacaatctgaatgaacttatcgatggcaatcatagcagctatacagacagtgaaccattatgtgatgagcttgcaactaacgatgacttaccgtcaagtgataagcttatgactaatgatgacttaccattcactgacgaacaaacacctcataacggttctggtaacagctcaaataaaaacgaagcagatgaggctaaatcctcaacggacagcattgatacatcagatatttctgaagtatcggcagtatccaaagatttcgaccattttgaggtagattctttcctaaactgcatgggaaaagacaatctgctcaagcttcatgagacgctggttcatgtttatggtatgaaacagggtcagacaatttataaaaccataaaagacaaatcctactcttttacacctgaaaagctcacgcgtaaaaagaaggtagagcgttttacaggtataattttcgcacacagtgatattaatgatcccggaaattttgttgattttcttgaaaaaaacaagaataaaacaaagaatctcaatggcataagatctgccatcacaaagagctatggtgagacagatggtctgaaatattacagccttttcaagccatatttcaaaattatatctgcactgaaataacgccctttattttacaacagaaaggtaatccggataaaacaattgaggcacggagtattaattccgtgcctcaattatgttattattacattttcaactctatacaattttatcattagaaaacataaaatccacattatataacgtgcgtgagagggcgctggaagtccggtggacttccgcttagcgccgaccgcaacgaagtgtagaacgaaccctggggttcaaatcgtccgcggaggatttgtagtatagaaaaagcaggtattacaacctgctttttctatactatataacgtgcgtgagaggattcgaacccccgacaccttggtccgtagccaagtgctctatccagctgagctacacacacatattttatttactcattcattataacacccttgtcaagtgttttgaatgaatgccgcagaccggaatcgaaccggtactgtatcactacaacaggattttaagtcctgcgcgtctgccagttccgccactgcggcatgaatgggacctacagggctcgaacctgtgaccctctgcttgtaaggcagatgctctcccagctgagctaagatcccatataaaattgtagtagatactcactacaaacgacccagacgggactcgaacccgtgacctccgccgtgacagggcggcgctctaaccaactgagccactaggccaaatgcttaatgcgtgatatataatatcacagtttgcacaaaaatgcaaggaaaaaatttaatggaccatcggggactcgaacccaggaccgaccggttatgagccggttgctctaaccaactgagctaatggtccaaatatataagccgatgatcggactcgaaccgataacctgctgattacaaatcagctgctctgccaattgagccacatcggcatacgacttatgacttttaactcagcgcattgctgtgctaaaaatgactccaacgggatttgaacccgtgttaccgccgtgaaagggcgatgtcttaaccgcttgaccatggagcctaagaaaaagaaaactccccgagtagggctcgaacctacaacaactcggttaacagccgagtgctctaccattgagctatcgaggattattaaagtttgtaccttcaaaacttcatacaaatccgatctgtttttctccgttattaaccagattaagccctcgacctattagtaacagtcagctccacatgttgccatgctaatggatctagcgtttgattgtagttgaattttttgttttttttatgctaagtaggaaaaatttgggaagttagcattaaagaaattctttcgacaaatacatttgatgtagtatgaaggattacatcatgtccatttttttctatatacattatatcattgtaaggtatgctaataatatcgttgcccttgtgataataataaaattctcgactaaataaatgaataaatttatcgagacaattatttattgtgccatagttaattggttttaaaagatagttgaatgcttgaacatcataaccatcaaatacatattccttaaatgcagtaagaaatataataatacctgtgtaaccgctttctctgagctgtttgcatgcatcaattccggtgaatgagttattgcaatttaattcgatatcagaaaagaataaatcacattttagagtaggcagggatttaataaattttttatatgaattaagccaaataatatttattaaaatccctgtgttagcagcccatttttttattgagtctgagagtgttatgaaatcactttcattatcttcaagaattgtgatgttaataatcattaattatcctccaatcaattatctaaaggaaataaaatagaaactgagaaaatctcagtgccgggatcaaattctatgatgccattatatttttttacaatctcattaatcctttttattccgatgccatgttcgtttttattagaagtttttgtggttaaaaggttgccatttcctccataaaggtatataccatttgaactatttgatataaatagtagtagcatattgttatatggtttaatttcaatttgaagtctacgtttagtcatgtctaacttacagttggcttctattgcattatcaagtaaattactaattaatgaacacaaatccatatctgaaatgttataattagctggaaaatgaatctgatgttttatagaaatattattatctagtgctttcgagagttttgctgtcataatacagtcaatggggattattccagttgagattgtatatgatgtcctttctatagagttatttatctggtatatgtattttaaggcgtcagaattttttccgttttctacaagtttatatagaatgctcatatggttcatgatgtcatgtttaaataccctaagactatgggtggaattaattatttcctcattttgtcgagcttccatttgattaattgtaatactctgaataagtctgtcatttttttctttttcttttccaagtctataaatatatatggaaatatatacaaataaaaatagtgtaagtccgaaaataaataagagtaagtggaaaaagttttcagcgtatattgactgttttaataaaataataagtacaatctcttctaatatgacacatatagtagaaattatgaaataggaaattttatcaagttttcctaaaacaaacacctgtggagtaaaaagcaaaaatatgattacaaacaaggcaattatggatatatatattaaggaaaaaagtattcgcatatttcccaaatataatacctgcgagagatttatattataaaactttattggtattaataaagtcaaagcatctgaagttattagtatcaggcaatagataaaagagacaaaaaaactattaaaaataggattaacaaaaaataatattaagaaaataatattaagtaatagtacagatgttaaagaaataatggtagatatcttgcttatattcataagagtaattaatagtgatttacatagtatgaataatgtttgttcagccgtatgataatgatattgacgtttagtaaattttgcattgcaaattacagcaaatagaaacgattctaatagatttattataaattcccaaactatgttaaacatatattctactccttgattagtgtaagtaaattataacagatgctctttttttctacaatgagcaataacactatcagcaagctattcacagccaattttatgtcgtttgcgccaaatatcttgtataaattaataaattgtgtaattcttagattaagataaatattcagaaccgcctagtgaatatttgtaaaactgtacgatgctcgtgctttcccgagactgcgaagtaaattttgatcatatctgtggaatggctctattcgagctaccttgagaacaagaaaatctcttaacagaaaggtatacataaatgaagaaaaataaaatactagttggtgttatatcaattatgtttgcaggaataattgcattggggataatagaatgcaacaatagcaatacaaaggataacaataaattatttattggaaatggcaaattttgtcaagcaaaaaggttgaatggattgggtgccatttatgatgatgactatatcttttttgattgtgagaatcaaatatatgaatcgtataattattctaataaaaaaaacgacaaaaagcttaatgtgaattgcagaaattcagcttgttcacacagcaatgatacatgtgaagcatatgttgaacttggtgagtattttgttttcaatagtaaaatatacaaatgttataacaaaagtaaagttgtatcaggtgaaaataggttgtatggttctattgttgaggcagaatcgggaaaaacggtctttaaaaattctattccaactgatatgtcatcagaattagcaattgatgatagtgaggctattttatatgttagggtattgtcggatgatatagtaaaagtagatggtgatagacatgcctatttgttggacaaaaattttaatattatatactgtcattacaatattggcaaatttccatggggagctattttgaatggaaattattactatatcaatgatataaatgaaattgtcaaggtaaatttaacaacgtttgagagtaaatcaatagcatcaaatggtaaggcttttatggcggataacgatgagaattttatatattattcaaatgaatttagcgaattatataagttgtcaccggatgatgaaagttctataaaaatagcagataatgcgcttttcttttctgtacagaataaatatatatatgccagtggtggagataatggtaacaaaataatatatgataaaaacggaaaaattattgccgattattcagcttgtataaatatgggagctgattctgcctttcaaataaatgataaaatatatacaatatttaatggtggtgtagcttacatggatcttgatgggaagaattatggtgagatgatgcaatgagatatgaaattaaaaaaatattatcatgtaaaatacttatgatttctatgattgtggcttttattttttcaatggcaatttcatataatgcatatgctaatgagaaaataaatttaagagagttttctgcatatattggtgatttttcagaacaaaaatatgatgtgatagagcaaaaagtaatggagttacaaaacaaatacgaagaaacacaaaatgcagatgtaatgaatgaaatgtttgtttatctgacattggataaagatgctttaaattgtcataatgttattgaatatagggatagtgttatttctgattctgaaattaaaataaaaactgagtctggatattataagagaatgaacgaaacgataaataaattatatggaaagaagactaatcttgtaattggagaaagtgagactttaaatgaagtatatgatttattttgcgtaactgatattgtagatattgtatttattattgtaattattttattttcttcttatttgtttttgaatgaacataataacaatacattttatatgattaaatcatcatatagaggtgggaagttatcttatcggaataaaatagtggtaacattatttttttcgataatggcatcagtggttgaaactttgggaatgacaatatggtcagttttttggaataaaatagatcaatggaatacatcaattctcttaaataacgctttcttacattcaccttatagtattactttatttgagatgataattgtagtagtaattatgagggcaattggtttttttgtattatctagtgtatttatttttgtttctttattttttaaaagtaatattgtgccgatagcgattaatacatttattggtctgggaggtatagcaattaattatattttatcaggaaaatattttgctttatctggtggcacaatcagagaagctgaaaattatgatattcttagaaagtatacaccgtttccattgattagtgaaagtgtcaattattttaaggaatatgaacctattaatttaatgggagttccaattcagttattaagttattctttaataattaatctggtttttgcaattatagtgatagcgctgggttactatttttataacacgaattttagggaaagttgagttcaaaaatatcatgctagagttaattgatataaaaaaaagatatggcagtaaagaagtattgcatggaatcagcatcaaatttgaaaatggtatttatggattgattggaccaaatggatctggtaaatctactattatgaatataatgtcagatgttttggatatgagttcaggcaaaattttatataatggaactgatataaaagaattagatgacagatatagggaaaaaattggttttttgccacaaaatgtaggttattatccaaatttcacagcaaaaaaaaccatagagtattttgggtatcttagaggtgtaaataaaaaagaattagattcaaacgtggaacaggtgttaagggatgttaatttgtatgagaatcgtaacgataaggttaaatctttttcaggaggaatgaagcaaagacttggaattgcaataacatgtgtagctaatccggagattattatttttgacgagccgacagtgggacttgatccggaagaaagggcaagatttaaaaatctaattagaaaattatctaaaacaaaaactattgtattatcaacacatattttatcagacgtagaggaagtggctgactatataatattgattaaagaaggatgtctgacaaaatttgagaagattggtgggaaggataatgaataatgttaccaaaatggaattatacaaagttctttcaaaacctcaggtatatataatttttgttgttggactaattattcaaatcatcatggcgggacagatgagaacaactatgtttaatggatatcataagtctgtgtatgaaaattatatgaatgaaatggaaggcgaatattcaattgaaaaaaaagaatacattaattcagaatatcagaaattccaagctattatcgatgataagcaaaagaatgaaattgcatttaataatggcaaaatagatggtaaggattatcattctataatcaacgaagaaaagaaagctcaatatagaatagcaactgtcaaatacattgttgagaaaacagagtattatgatagtctggataaaagtgcacaatatttttatgatattgaaataagtgattatattgaaaatttgaggtttaatgttatacctataatagttattttattgattgtggtacctatgtatacagatgatatatatgcaggaacattagctatgattaaatcatctaaaaatggaagaatgatattgttaaaatcgcgactgaacattagtttattaatttcgttgttgatatgtatattatttgcatttgttgaatttgtgacaaagtacattatatttgatttaggaaatctgaatgcaggggttgaaagtctgatgattgagaggactatgcatttaccatatattatatcggacttgtctatatggcaatttattgttttattatatctgttctatcttataatctcggttatgattagcataattggtttattagtttctaaaatatcacgaggaaatatagaagcattttcaataatgagcgttattattgtaggtgtttcatatattttaaatattttgtgactgatatgtaatgacttttcaataaagagactgaatatgacgtttgcagactttgaaagggcgatgcaaaaggcgggatacaagctctaatcaaccagtcccttattcttccactttccgctcttccagcgcagcaccataccgacggctctgatgcactcgtcacttgcgagtccgatgtaagcaccgactgcgagaagccccagatgaagtccgaagaagtatgttccaccgaccgccgcaaggtacatgaaaacagcacccatgacaaccgggaatacggcgtcaccgcttgtcttcagtgcctgaccatagaccagattggtgactcttccaagctccagcacaatatcgatggcgagaagctttgtgacaagatttatcatctgtacgtcattcgtgaagattcgcgcaatgtagttacctaaaagcgcaaatgtgatagaaaggcaggatgccgtaatcacaccgtagatagcggctttgcgagtgcccttattacattcgtcatactcctttgctccgatatgccagccggtcaggatggcatttgcctgagctaaggcagcaccgatacagtacgaaaagttagcaatctgtaaggcataagagcgcgcagtgacgttcagtccgtcagcatccatctggttcatgaatcgcactacaagagtcattgcgatattgtaaagcgcggtttcacaggcagacgggaagccaatctttataatctgtccgaggatttttccgggagctatgcgctcgggactgtcctttgctttgatgagcacagcgcccattgtggcaacaataatcagattgataatacgtgaaataaccgttgctgtggcaacacccataacgccccagttcattacaaagaggaaaacagcgttaagtataaagttaatgacatttccaataattgatgcccaaagtgactgttttgtgtagccgaaaactctcaggtagcttgaataaatcggtatgagagcatttaaaaagcaggcacctccaacaatgcgcagataagtatttgccgaatcaaaaagcgccggtgcaatgctgaccattttaagaatattaccggaaaaaacagccagaaatacagacatgagcacacctattacagcgttaaatataagcccaagctgtcttgcctgatatgctatacccggtttttcggcaccgatattctgcgtcatgacagcaaccataccgcttgagatgacaccaaacatgatgatgaaaacggagatatatgtatttgccgtgccgacagcaccaaccgcctggtcgctcacggatgacagcataagagtgtcgaccatgcctgacagcatgtaaaaaagtgtttcaaagcatattggaatggaaagctgtgtaagtgtttttctttgaacctgcatatagattacctgatttataatgtatgtatactttgcgatattaacagaaagaatgcaaacttctcattataaacttcatttgggagaggaagatataaagaagggaagcttgcatgcatcaatcaatatattacattatcacaaataattcttgtattatttcaaggaaaaattgtactatttctactttatctataactttacagtgttgattcatcaaaaccttgagaacaaataaaaaattgcacaccttatgcatgtaatatgttaaaataaaaatagttgatatatcattattatagtaaacaaaccggatggggattaaaagagattaaggaatatgtagaaaaatgtattttgaattaaaagaaaaccggccacacggcacaccggaaaatccgttcagtcaataccatatcagtgatgtaaagcgtgcattccagattccggtacattggcacgatgagttggaaataatatatgtaaagcagggcaagctgcatgtgaccatatcaggtgaaaactatataggaagcccaaaggatgcatttgtggtatctccgggcagtcagcatttcatgggctcgccgacaggagatgcagattattacacgtttctgtttcctcttgaatatatatcatttcaggcggacgatctcatggaaaaatcaatcctatccccgctcaaacgaggcagacttatgattagtcctcagataaatgatacagcagcagatatatgcgagcggctgatagagataaatgcacagatatcagggaaaaacgcagaaaacacagatgctgcaaatatagaggcgcaatttgagacaaaaataactctcatcaaattcatccggaaaatgtggagaaatggtctgattctggaaaatggtacaaacggcatcaacacaacagaaaaagaaatgataacgtatatttggcaaaactatacaagggaaatttcactgaaggaatttggtgcacagtttcatttgtcagaaaaatacatatcacgctattttaaagagcattttcatattacgctgtcacagtatgtcaatcatctcaggctggagcacgccagacagctattggaggaatcagcagcttccgttacagaggttgcgatgtgcagtggatatcagaatgtgagctattttatacgtagcttcaagaaaatgtatggggtatcacctcttaaatacagaaattttcaaactttaccttgacaaagtgacaaaaagagcataaagtatattaaaagattaatttaacagtgtttcaaaaccgatgagaaagaagagtagacttttccggatatctcagagagctgcagatggtgggattgcagtatggaaggatttgttgaatggcctttcgagggtgatccgaagcgtttgattgtacagagcatagtttcttaacgattaaatcagtaggcgtcaccgggaaccgaacccgttatcatttcggcatgtatattagtacatgacagagtggacaattcgtcaaattgagtggtaccgcgataataagaatttattaccgtctcaagcattagcttgaggcggttttttgcataaacacccacatgatgaaatgtcgttagcgcaaatttgatttgaggctatgacatttggcttgttgcggcaggtttatgagaaaatcgcgaacatcgggaaacaaacacttcacaaagaaagtgaggaattcaatatgaaaaagaaagtattatcagtaattttagcagcagtttgcaccatgggccttatggcaggctgtggagcagagggctcaaagggctctacacagagtggcgcaaagggtgacagctacacagtaggtatttcgcagtttgcagagcatggctctcttgacaactgcagggagggcttcttagagggcctcaaggaagagggcatcgaggaaggtaaaaaccttaaggttgattaccagaatgcacagacagataccggtacagcaagcactattgcagacagcttcgtatctgagaaggttgatatgatttgcgccatcgctacaccatgtgcagccagcgcctacaattcagctatgaatgcagacattccaacagtatacacagcagtttcagatcctgttgtagcaggtcttgctaaggaggacggctcaagtgtcggaaacatcacaggctcatcagacgtgcttcctgttgaggagcagcttaagatgatcagggagatgatgccggatgcaaagaaaatcggtattctctacaccacaagtgaggcaaactcttgcagcaccattgaggagtacaaggagcttgcagataaatacgattttgaaatcgttgataccggaataaacacatcagcagatattgagattgcagcatcagatcttgtttccaaggttgactgcctgtgcaacctcacagacaacacagtagtaaatgcactccagactgttctcgacaaggcaaatggagcaaagattccggtattcggaagtgaaattgagcaggttaaatcaggctgtgtcgcttcaatgggaatcgattactaccagcttggaatcgagacaggaaagatggcagcaaagattttaaagggtgaggagaaagcctctgacactccgtttatcacagcttcaaaggcagagctttatgtaaacactgcagcagcagacaagattggcatgacacttgatgcagattatatcaaggatgcagccgagacatttgataagattgaagtaaaatagttacgttgatttttaaagcaggggaggatacaccgtgacactagttttaagcgttttagagcagggcatgatttatgcgatcatggctcttggaatatatatcacatacaccatactggattttccggatctgaccgtagatggaagctttccgcttggagcggcactttcggcggtactcatcacaaagggcgttaatccgatactcacactgcttgtgacatttgcggcaggtgcgtttgccggaatgctgaccggaatcatccatgtgaagctcaaggtgcgtgatcttttatcgggaattatcatgatgacagcgctttacacggtgaatcttcgtattgcaggaagagcaaacctgccaatatacaatatgaccacactttttgacaatgattttgtcagaaatgtatttaagggcggcttagcacagttttcaaatgtgattatcatccttgttatcacacttgtgatgaaattcctgctcgactggtacatgagcacaaagtcaggatatctgcttcgcgccgtaggtgacaacgagactatcgttacatctatgggtgtggacaagggcatcacaaaaatcatcggccttgcaatcgccaacggcctctgcagcttaagcggatgcatttttgcacagcagcagagatatttcgacgtatcaatgggaaccggaacaatggttatcggactggcgagcgttattatcggaatcagcttgcttaaaaaggcaacatttttgcgtgtgacctcgagtgttgttattggagcgattgtatacaaggcctgtgtggcaatcgctataaagcttggtatgccgtcgagcgatttgaagctcattacagcggtattgttcctcatcattctggtgcttggaatggatagaaacaaaagaaagaaggtggcataatgttagagctcaaccatatccacaaattatataatccgggaacagtcaacgagatatgcctctttgatgattttaatctgaaaatagatgatggacagtttgtttccgttgtaggaagtaatggctccggaaagacatctatgctcaacatcatctgcggttctatccctattgacggtggcagcatagtggtaaacggcactgacatcacaaagcagaaagattttatcagacaccgccgcataggccgtgtatttcaggatccgtcaaagggaacctgtccttccatgacaatccttgaaaatctgtccatagctgacaataaaggaaagacatacggtctgggccgtggtacaaaccacagcaggatagagcattacaaggagatgcttgccgagttaaacctaggacttgaggataagcttcacacaaaggttggggcactttctggcggtcagaggcagacacttgcgcttctcatggctacgatgaatccaatcgagtttctcatccttgatgagcacacagcagccctcgatccaaagactgctgagattgtaatgcagctcacaggcaagattgtggcagagaagaaggtcacaacaatcatggtcacacacaatctgcgctacgctgttgaatacggagaccgccttatcatgatgcatcagggcaaggcgataatagacaaggccggcgccgataagaaagctatgcaggttgatgatattcttggcacattcaatgagatcagtattgagtgcggaaattagtgcatcgaaaaataaatatgaattgaaaatgtcctcctgtgggagtattgtataacgatacttctactaggaggacattttatatttcaaggattatagatgaggagatgaaaaaaggtgatttatttgtgataaccgggatgtcgggcgctgaacttgcgataagggtattagatatacctgatgatgatataatcataccctcatcatccccgacataatacatcctccggcggctccacattccataacatcagcaagtcgcggaacactaatgtctggcatagcatcataagcgggtggtgcatcggaagctgtgctgtcatcacttgaagcaatattgataccgccgattgcataaaccggtatctcaaccgcatcgcagacatttttgaggaaatcaagtccgcgcggagacagtccttttttgcagtcggttgcaaaaatatgtcctgccgtcatatatgtggcaccaagctgttcggcttttatggcatcttctacagagtggacagaggttccgataaccttgaagaattgttgataattgtcagtgctttttgacatatctgtggatatattgtcagataggtcttttttgacatatgcttcgaggattggcaatggcagatgtatatacggatgttcaagctctattgctacatttataaagctgtgcagcatgcactgcacatcatattttttacacagagcaatcacatcgcgtgccagagacagatattctgcctccggcatatccttttccctgagcacaattgcatgaggatggagcttacagacgcgctcgagctgttccatgaacggacggctgcaaaggtgtctgtttgtgatagcgattatattatcactctgtaaagcatgttttgagttttcgtataagagtttttctttattcatatttgttccaacatattcatatatacatatttatacctgttaaaattaaaatgattactgattctaattcaagcatttcattgtttacaggattcctacacgtaaatatagtcgctcatcaccggctgcaaaccattgtcgagcagtgcattaaatacctcatccacgcttctgccatcagagatttcaaactggtcatcgcccttgtcctctatatcgtccacatggcttccgattccggtgctgacaccggctgaaatcttggtggcggcaatatttacaagattgtcacgcacacgcgctacctctctagtagatatggtgatgcttgcaaacggcatgaagagcctgtaagcgcataccacctgaaggagctgtgtctcgtggacatcttttggattgatacggtcattgtttatgatagggcacagacgaggacatgagaatgcaatctcggctcttggatatttcttctggagcaggtatgcgtgatatccggtggcaagtgcatcctttctgaaatcatcgagacctaaaagtgcggcaaagccgacacctctcataccacccttaagagcacgctcctgtgcatttacacggtaagggaaaattctcttgtgtccggcaaggtggagagtctcgtatttatcagagttgtaggtctcctggaaaacggtcacatagtcagcaccgcactcgtgcaggtatgcgtattcgtcagagttcataggataaacctcaagacctataaccttgaaatatttgcgggcaattttgcatgcctctccaatgtattcgacgtctgacattttcttgctctcaccggtgagaatcaggatttcctgaagaccggttttggcaattgcagccatttccttttcgatttctgaggcattcagctttgcgcggttgattttattgtgacagttgaaaccacagtagatacagtagttttcgcagtagtttgatatgtaaagcggtgtaaacatgcacacgctgttgccgaagtgctttctggtctcaagctgtgcagcctgtgcgatttcctcaataaatggctgtgcagcaggcgagagcagagccttgaaatcctccaatgtgcggtattcgtgggagagcgccgcgcgaacatcggctgcggtatattggtcgtagtcgtatgcatccatttcggcaacaaccctgtccatgatatcggagtcaagcacctccatatcaggcagatatttcatatgatctattctgtttttcttcatgtcctcgaggattacttcgtttacaatgctgtcgttgaagtggtcatcgtgggcgatatttgcattgatatctttgtcatttgttatatttgtatcgttagtcattatgtgttcccttcaaaagctaagtgtcatttatgattagtcgcgcagatatcctgtcagaggagatgatgcgctggctcctttggtcagagtgcgtccgagtcctgacagataagccattcttccggcctcgatagcctttttaaatgcctctgccattatctcaacatcaccggctgttgcaacagcggtgtttgccatgactgcggcagcacccatttccatagcctcgcatgcctgtgaaggacggcctatgcctgcatccacgatgataggcaggtcgatttcgtcaatcagaatctggataaattcctttgtgcagatacccttgtttgagccgattggcgcaccgagaggcatgatgcaggcagcgccggcgtttgcaaggtctcttgccacgttgaggtcaggatacatgtaaggcattacgacaaagccctcctttgcgagaatctctgtagcctttattgtctcaaagttgtccggaagcagatatttgctgtcacgcatgatttcaatttttacgaagtctccacagcccagctcgcgggataaacgtgcgattcttacagcctcatcggcatttctggcgcctgatgtgtttggaagcagtgtgacattgtctggaatatagtcgaggatgtttgccagtcctccatcgtttgcacggcgcagagccagtgtgataatctgtgcatcagccttctcaatgcaggcttttaccaggtcgagtgaaaactttcccgatccaaggatgaaacgtgaggtaaactcgtgacctcctaaaactaatttgtcgtttgctaaatctatatttttactcatgattaactccttatatttttattgatggtgtaaaaagtgtttgattttaatcagcccccacccataaagcttaaaatctctaccacatcgccgtcggcgatagcagtgctgtcatactcagtctttggaagaatctcttcattcagctccacaacgatgtgcttagggttgtaattgttagctgaaagatactgcgaaacagtcatgccgcatacatctgcagcttctttaccgttgatttttaccattgtgcgtctcctttccggattgagatgtggaaaaagcggggattaccccgaagcaatacataaaaaaagagttcacaaagtaatacacccgcggtggtgtaccccttcatgaactctgttcactctcaaaaatccgttattaaactatgtaaatatgtaaaattaaaagggagataccaataattttacaaacatgagtatagtaccttgcaccggcaaagtcaactgatttttaataaaacagcattacgttactgatatgtagtaactgcattacaacaatttccaacaaattttacataacgcagacagtatattttcattagaatgatatgattaaagggtcaaaaggtatcatcgatgcatgcgtagcatgtagtaatctgattaatcataaatgaggggcaaaatatcttttgaccctcatatcatgtaataaaaggtaataaaaatgatattgaataatttctgatagccgatttgatggaggaaaataatgtttgacgaagaaatgataacaaaatacagatacataatattacttcttggtacagcagtatcgtttgtgcttggctttgcggtggcatttgcacttgctaagctgtgtggagtgatggctgtaaaggcagtgctcaatatcgctttcacggcaggcggtatcacaggaatgcttggctttgtgtgcatttgtctggctgagcttagacgcatatagtacatcagaaagctgatgtatcgcgcggttttgctaatgtgtgtgggaaatctgaatagctactaataagaaaagaaaggaaacggaataaattattttgacatacgacgaaataaaaaaggacaaagaaatatgtgaatgcctgcgcaagggagatgaaaacctcggagtgctgggctacacagatcattcggcggcacactgcacgatggttgcaaagcgtgccgcatatattttaaaaaaattcggatacagtgaagaggatattgagcttgtaaagatagcgggctttatgcatgatattggaaatgtggtcaacagaaagcatcatgctgagtacggagcgattttagcgaacgagattctcaaaaagactgatatgagcatgaaggacaggattacggttgtctctgcgataggtcatcacgatgagtccacaggaggagcaacggatccggtctctgcagctcttatcattgcagacaagacggatgtgcgaagaaaccgtgtcagggaaaaggcaaaggaaaattttgacattcacgacagggtaaattacgctgttacggatgcggcgctcaagattaatatagataaaaaggtcattgcgctcaatcttcagattgatacaagcatctgctcgatgtatgagtattttgacattttcttagggcgcatgatgatgtgccgcggtgccgccgggatactcggagctaccttcaagctcactgccaatggctctaaggtattgtgatgagtgcatgggcagatattattgggcaaaaaatcatcaatggatctgaatagttactgatttcacataaaaagtgcatattcgcacacaaacaaaacaaaatacaaattttattgaaaaacttacttataaagtttctcaactcttgaacttaaaaatgattgatagtataatttaagcgattggtgaaaataagattaaatgataaggaggaaatcgcaatgattacctggaacaacttggataccctggaatccttcaaggagctttctaaagtgggacgtgttgacataaaagaggccatgtcaggagacaatggcgctaagcgtgtcaaggagtacaacatcccaatggcagagggattcacttacaactttgctgcaaagcaggttgacgcagatgtgcttgaggcacttgcaaatcttgcaaaggaggctcagcttacagagaaatttgaggcactttataatggtgctgttatcaatacaggtgagaaccgtctcgttcttcaccagctcactcgtggacagctcggagatgctgtagtggcagacggagttgacaagcgtaaattctacgtagagcagcaggagagaatcgctgagttcgcaaataaggttcactcaggcgagattacaaacgcagcaggagagaagtttacaacagttgttcagataggaatcggcggaagcgatttaggacctcgtgctatgtacttagcacttgagaactgggcaaagaaaaacaatacattcaagatggaagccaaattcatcagcaatgttgaccctgatgatgcggcaagtgtgctggcatcagttgacgtagctcactctattttcatattagtatcaaaatcaggtacaacacttgagactcttacaaatgagtcattcgttaaggatgcattaaagaacgcaggacttgatgcttctaagcacatgattgctgtaacaagcgagacatcaccgcttgcaaagagcgatgattaccttgcagccttcttcatggacgactacatcggaggacgttactcatcaacatcagcagttggtggagcagttctctcacttgcattcggtcctgaagtatttgcacagttcctcgacggagcagcagcagaggataagctttcaaagaatgcagacatcatggaaaaccctgagatgctcgacgcactcatcggtgtttacgagagaaacgtactcggatatcctagcacagcagtgcttccatattcacaggcactcagccgtttccctgcacatttacagcaggctgatatggagtcaaacggcaagtcggttaaccgtttcggtgagcctgtagattatgttacaggaccggttatctttggtgagcctggaacaaacggacagcactcattctatcagctccttcatcagggaacagatattgtgccactccagttcattggcttcaagaacaaccagcttgacacagacgtagtcatccaggacagcacaagccagcagaagctatgtgcaaacgtagcagcacagatagttgcatttgcatgtggtaaggcagacgacaacaagaacaagaacttcgagggtggacgtccttcaagcatcatcatcggagaccaggtaaatcctgcatctcttggtgcactccttgcacactttgagaacaagatcatgttccagggcttcttatggaatgtaaacagcttcgatcaggaaggtgttcagcttggaaagatacttgcaaagaaggttctcgcacatgagacagacggagcactcaaggaactcagcgatatgcttaatatttagtacatcgttttgcagaggtgaagatacagaaatataaaaacgagccgcaatcctgtgggtatcaggattgtggctcgttttgttctgccataatacatccgggttaaagatgatatatgacgaattgggtgagataatttatttaggtttatagttactaatgttgataaatgttatcattatttgtgtgctttgtgaaagacaatatcatccttgatattgctgtcgtatttggtataagcatggctatggctgttatttccggctgcatcactgtcgtccttctcaggaccgttctccatccaccaggcataggctgcagcgccgatacaaacggcagcacacacgacaattattattgtttcaagcattttaaatcctccgttttactttatcagcatgacgcggagaaaatgtttatttaatgtatctaagttatatttcctccgcatatgcgcgagttttgaaataatcagcgaaggaaattagtttatgcccatccttgtcgtggataaaacggataataaagcgccggctcgtgtttgtgagacatatgcgcatgaccacgatagcggcatatgcgaataaaataatatgtattaactggagtaacgcacccagccagcttaaattggatgtaagcctgcctaaaaaaccaagcgaagaggtacggatgcggcatatgactgcaggaaaagaaggtatttcttctatatactggcaatccatgagtgccgacatatctgactctgaataaagcactgcgcgtgagtccaagacttcctgctgtggaagcgcggccttatcagaagaagcataagagccccagacaaccctgtgatcgtatgaaccgtatgctgtgcggtcaggatcaaattcgtccagatttttgtcgagacttagaaaggagcagaatataagacatagcaacagtggtaaaaccagtattttcttcatgagagtccgctcctttccttccaatttatgtttctattttcttcctttaggttaaaaaagtcaacttttaagtagatttcttttcaaaaatattgaaattcttaatgggctgtaattgtaaccaaatgattatcttaaatcaatgatatacatattgcataaaaaataattgaaaatttatgcatgtttgtgcatcacgataatagacatttttcatggcacgtgatactataattaacgtaaaaaccccccaatacattatatatttttactatccccatagtaaaataccttctcctaaaggacagcagaacgatggctgttctttttttgtctcaaaatagtgtatatttcgggaaacaagcagatataatattgttgaaatgatttagacatgatacaatcggattagatattagatagcacgcaagaagcgagacatgctgataacagctctctttcttcaaacctgcagacattgaaggctctgatggtataattcagagtcactgacaccaaatactgtgagcagatgatagttgattcacgtatgaggaggaagaacattttaagatttagggtgtacttccggcgaagtgcaccctttgttagtgaacaaagaggtacaataaccgcatgcgcatctgcatgctcgcatgcaagggcgtatgtggttattggacatcccaacataaattgaaaattgtagcagcgtcaagctgcggagaagcctcgaaagaggcgaattttcaattaatgttggggctttgttctcattaaatacaaagaggtacaataaccgcatattaaatattataaggagtaacgcatggaaacaagaattgccctgatcggcattatagttgaaaacccggattcggttgagcagctcaatcatctgctgcatgagtacggcagcttcattgttggacgcatgggtatcccatacgagaaaaagaacgtgaatatcatcagtgtggcgattgacgcaccacaggatattatcagtgctttgtccggcaggattggcaggctggatggcataggagtgaagacagtttactctaataaataaagcagaccagactacaggagaaagcatgaccgaaaatacagcaataataaaaattatagatgaaattacggcctgccggaatatcaccctcgagcagctgcatatgttgcttgagacggatgatatgcaggcagttgattaccttagaaagagggcatctgagaaagcacacgagacctatggcaatcaggtttttatacgagggctgatagagtttaccaactactgcaaaaacgactgtctctactgcggcataaggcacagcaatactcacgcggaccgctaccgcctgagtacggagcagattatggcatgctgcgagagcggctatgagcttggttttcgtacctttgtgctgcagggaggtgaagatccgtactacacggatgagcgcatctgtgagatagtgtccgggattaaggcaaagtatccggactgcgcagttacactctctatcggagaaaagtcaaaggagagctatcagagctattttgatgcaggggcagacagatatctgctgcgccatgagactgcggatgaaaagcattacagtaggcttcatccggcagagatgtcacttgcaaacagaaagcagtgcctttgggatttgaaagagataggatatcaggtgggctgcggcttcatggtcggctcgccgggacagacagtggagaccttgtacgaggatttgcagtttataaaggagcttgagcctcacatggttggaatcggtccgttcatatcgcagaaggatacaccttttgcaaacgaaaagtcaggcacgatggatgagacgcttcgcctgctttcaatcatcaggctcatacatccaaaagtgctgctgcctgccacaacagcgcttggcacaatccatccgctcggcagggaaaagggtatacagtcgggtgccaatgtcgtgatgccaaacctctcaccggtcaatgtccgtgacaaatacaagctttacgacaataaaatctgcaccggagatgaggctgcagagtgccgcttctgcatggaaaaccggatgaagagcatcggctatcaggtggtggtgtcgcgcggggactacgcagatatgtgattacaatagaaggagataaaaatgtacaacgtaaaatcattaaaggctgaggaattcatctcagacgaggaaatcaaagagactctcgaatacgcagaggcaaacaaaaataatatagggcttatcgatgcgattatcgagaaagcaaagctaaaaaaaggactcacacacagagaggcatcagtgcttttagcctgtgagattccggagaagcttgacgaggtttacaagcttgctcagcagataaagaaggatttctacggaaacagaatcgtgctttttgcaccgctttatctgtcaaactactgtgtgaacggctgtgtttattgtccatatcacatgaaaaataagcatattgcgagaaagaagctcactcaggaggagatagtaaaggaggtcacagcccttcaggatatgggacacaagcgtcttgcaatcgaggcaggagaggaccctgtaaacaatccgattgagtatattctcgagtgtatcaacacaatctacagcatcaagcacaaaaacggagctatccgccgtgtaaatgtaaatattgctgccactacagtggagaattacagaaagctcaaggaggcaggaatcggaacctacatactcttccaggagacatatcacaaggagagctatgagcagcttcatccgacaggaccaaagcatgactatgcatatcacacagaggctatggaccgtgctatggagggcggcattgacgatgtgggacttggtgtacttttcggactggacaaatacaagtacgagtttgcaggacttttgatgcatgcagagcaccttgaggcagtgcacggtgtaggtcctcacaccatcagtgtgccgcgtataaagcacgcagatgatatagacccggatgtatttgacaatggcatcagtgatgataccttcgccaaaatatgcgcacttatccgtatttcagtgccatacacaggaatgataatctcaacccgtgagagccaggctgtccgtgaaaaggttctgccgctcggtgtttcacagatcagcggcgcatcaaagacaagtgtcggaggctatgcagacccggaggctgagaaaaatgcagaggcaacatcggagcagtttgatgtcagcgaccagagaacacttgacgaggtggtaaactggcttatgaagatggactatattccatccttctgtacagcctgctacagagagggcagaacgggagaccgttttatggcactgtgcaagagcatgcagatacttaattgctgtcatccgaacgcactcatgacacttaaggagtatctcgaggattatgcaagcccgcagacaagagagcttggaatgaagctcatcgacagggaaatagaaaagattaccaatccaaaggttaagcagacctgctatgagcatatacatgatattgcagacggaaagcgtgatttccgtttctaaagggggatacatatgggaaatttgaatgagacgccttctgccaacagccttcatataggtatatacggaaagacaaacagtggtaagtcatctctgataaatgcggttacaaagcaggaggtttccattgtagctgacgtggcaggtacgacaaccgaccctgtgtacaagccgatggagattcatccgctcggaccgtgcgtgattattgatacagcgggctttgatgatgacagtgagcttggtgaaagacgtgtggaaaagacccatctggcagcagagaagacagacatagccgttgtagtgcttgatattgcagaggtcattgctgcaaaaaaggcaggggtaccgtttaaaaaagcttttaaggatgaggcagagtggagcctgttatttgcaaaaaaacatactccggttgtatttgccttaaacaagatagacgagattttgctttctgctgaggcacaggaaaagagcaggggaaagcttgacaatgctgcaatagaggccgcaaagtgctgggtttatgaggaaaacagtgctgtgatgggcaaaaatgcagacaatagctttgaggttgtagcagtcagcgcattaaagggcaagggaatggatgccgttatctctgcactcacacgccttttgcctgaggatttcggacaggaatttatcctgggagaccttgtttgtgagacagacctggtgcttcttgtcatgccacaggatatccaggcgccaaagggcagactcatattgccacaggtgcagacactcagggaattgctcgatagaaaatgccttgtgatgagcactacaactgacaaaatgacagatgcacttgcagcattatctcacgcgccaaagctcatcgtgacagattcacaggtgtttggctatgtgtacgagcacaaaccggcggagagtatgctcacatcattttcagtgctttttgcagcatacaagggtgatctgccatattatgtggagagcgcaagggcaattgatgcattaaagccatcctcaagagtgcttatcgcagagtgctgtacacatgcgcctcttgcggaggatataggcagggtgaagcttccgaacctgcttcgaaagcgtgttggtgaggagcttaccgtggatattacaagcggtacagacttccccgataatctatctcagtatgacctcgttattcagtgtggcgcttgcatgtttaacagaaaatatgtattatcaagaatagacagggcacgcactcagcatgtgccgatgacaaactatggcgtggcaatagcacacctgacaggaatactcgataaggtgagcatgccatagaaaagccttaaaagccgggagaaagagaagctatcggtatgacgaaaacaagtgattttgatgacaaagtgaattatagtgacgattataaaggtaattatagcaataattacagcggcgattatagagacaattacagtagcgattatagcgccaccggttacgctcgtctagcgaagagtcttattgatatagtaaaagagcagcaggcaaagcttggctacaggaaggaaatagtcagactgtattatcctctttccacgctcagacatttctttgagtgtgcaggggctgataataaaattgcaaccggcatgatttcagaacagcagatgcttgaaatccttgctccaaacaacctgcccaaacagcttactgacaccataggtgagataaaggtcaccgcaaaaaatgagcgtttctgcatagagataccacctgagggcagtgagtatgtgcatgaaaacacagctgacaatgagttcatcagtgagctgattgcacttgtcggcacgcatggctgcaccatggagcagataactgagctgttttacaaatactcggacgacatcgagaaaaaggaaatgcaaaacggcgagtttgactgttacatccgcttcttaaatgagccggatgacacatactactattgcttccatgacgagggctgccatattatttaccatagatttctgccgcaggattatgcggactttggattttaatggatatgtttctttcttttggtgttggtctttgaatttactttgaagttacacggaaacatagtttgacaaaaatataacaatctaatataatggcggttgagagtatggtttatgtataatacgcgcacgctgagtgagggagacacgatgttattgttcataccttaatgtgaacagcagcacagcaggcacagcatagcaggagatatacacatggcaacatttaccagaaaagccataatgaagacttttttacatatactgaaaaacaaaccgcttgacaggattacagtcaaggatatatgcgagcagtgtgagataaacagaaatacattttactattatttcaaggacatatatgatgtgcttgaggccatatttgaggacgaggtcaggcttgtgatggatgaggcaaaggaaggcgtgacatttcatgatgcatatgccagagtcgctgccattattcttaataaccgcgaggcgataatgcacatttatgcatcggaaaacggcagggtattaaggacatatctggatgccgtggtcacacagatggtgcgccgctttgtgctggaaaaggcagagggctatagcctggatgatagtgacattgcttttatcacggcattttacagcaacggaatcgtgggcagcacaataaagtggattgagagatgcagtatgatgagcggcctacctgagaccattacggcaaatggcgttggactgtcaaaaagccaatacaacagagatattgttaagagaataggtgactctttcgatgccacaatttatgatatgattgagtgctgcctgtaggcaggtggatattggatgacaaaataattcgaacagatttgatagagtgtctgaatttcagacactcttatttttttgtccgttttaaattggctgttgcaggattaaaatagcagacaaaaaggaggaagatactttatgcatacattggtacatgtaaaaaatgcatataccgtcatgacaatatgcctgattgcattgggggcagctttgttgttcatgccacagcttggactaaagacaatgtgcatgttatatggagtgtttctcataatatatggcgtgacaaagctgtccggatattttgcaaaggatttatttcagcttgcgtttcagtttgacctggcgcttgggatagtttcaatagtgcttggaatcataattattaaaaaaactgagtatattatagagatattgtccacagcaataggcatttttatgttggtagatggagcgttcaagatacagactgcagtggaagcaaaacgctttggcatcgagaactggtggctcatacttgtgatgtcatttgcagttacatttgtgggcatactgcttttcgcgacaccatttgagaccgcaggcatgatagtgagattaataggactgaatttgagtcttgacggaatattaaatttatttgtcgtcagaaataccgttgaaacaataaggaggaatacaaagtgggaaatttaggacatcaggcagcgagacttgctgcatcaaaaatatgtgataacattgtaaaaggactttgcaaggacccggagacagaggttgtaaagctcatcgacatgtggcagaaattcatgggagatgagaagattgatttaaactatgacagtgcgcgcaagatgatctgtgataaggactgcacgctcaacaagtacatgcatcgtcttatcaatgagatagatcctcatgtattaaaaacaatcgcactcaatctgggctttgaggcatttgtttacggtaccaagactatccgtaaaaatcgtgaaaagtatggctgcaatgtgccatggctcatccttatggatccgacaagcgcctgcaatctgcactgcacaggctgctgggcggcagagtatggccacaagctgaaccttacctttgatgagatggataaggttgtaacacagggcaaggagcttggtgtatacctgtatatgttcacaggaggggagcctcttgtcagaaaagcagaccttgttaagctctgtgagaagcacagtgactgtgcatttctggcattcacaaacggcacactcgtggatgaggccttctgcgcagacttaaagcgtatcggaaatctgtaccttgcaataagtcttgagggcttctcagaggtaaacgacttaagacgaggcacaggtgtatttgcaaaggttatgcatgcaatggatttgcttaaggaaaacggacttgttttcggtacatcaatatgttacacttcaaagaactataagacagttaccagtgatgagtttatcgacatgattgtggaaaagggctgccgctatgcactttacttccactatatgcctgtcggaaacgatgcatcactggaacttttaccaaacccacagcagaggctttacatcaaggaccgtgtccgtgagatcagaaatatgacaagcggcaagggaattttcactatggatttccagaacgacggcgagtttgtcggaggctgtatcgcaggaggaagaaactacttccatatcaatgcaaacggcgatgctgagccatgtgtatttatccactactcaggagccaacatccgtacacacagcatgcttgagattttaaaacagccgcttttcatggcatatcatgataaccagccatttaatgagaatcactacagaccatgtcctatgcttgaaaatcctgagatcttacagcggctcgtaaaggaaacaggtgcaaaatcaactgatttgcagtcacctgagagtgcggagcacctgtgcaacaagtgtaaggagtatgcgcaggcatggaagccttgtgccgataagctttgggcggaggaaggacacagtaattaatgatatttgaaacacatgcccattatgatgataacagatttaaggacgaccgtgatgaaacaataaaacgcgtccatgaaaaaggagttgccccgataataaatgtcggggcttctattggttctaccatgactacaatggagctcgcaaagaaatatgactttatatatgcggcggttggagtgcatccaagcgacatagctgatttaaacgaggaaacctttgcatggcttagggaacagactgcatgggaaaggactgttgcagtcggggaaatcggactggactattactgggataaggagccaaatgtgcaggaaaaccagcgctactggtttaagcgtcagcttgagcttgcagcagaagcatcgctgccggttatcatacactcgcgtgatgcagcacaggacaccatggaaatcatgacagaggcagcaaaaaagaatatccgcggcgtgatacactgctattcctattcaccggagatggcactggagtatgtaaagctggggtattatatcggagttggaggtgtcgtaactttcaagaatgcaaagaagctggtacagacagtgtcagagcttccacttgatagaatccttcttgagacggactgtccatacatggctccggagccacatcgaggcacaaggaatgattcgtcaaacattccatatgtcatatcaaagatagcggaaatcaaaggcactacgcccgatgaggtagagcgcacgacacgtgccaatgcatttgaactgttcacacgtgtaaataattgagccacaacttgaggtatgaaaaccgcgaaaatttacaaatataattgaaataaaggcatttcatgtgataatatgattaaagggtcaaaaggtatcatcgatgcatgcttgcatgcaattcgatgaatagcttagtgatcctcatatcataatataaagacagcagttagactgtcacatcagatgaaacgacacaaggagtgcatatcatggcatatttgggaaatcctaagaacacaatcgaggttttgcagaaatacaatttcaattttcaaaagaaattcggacagaacttccttattgatacaggcattttggaggaaatcatagactcggccggcatcacaaaggacgatatgatacttgagataggcccgggaataggtacgatgacacagtatctgtgtgagtcggcgcgccaggtaatagcagtcgagatagatacaaatctgatacctatacttaaggatactctgagcgaatatgataatgtaaaggtcataaatgatgatatattgaaggtagacataaatgctctggcagaagaatataataatggtaagccgataaaggttgttgcaaacctgccatattacataacgacacctattattatggggctgttcgagagtcatgtgccgatagacagcattaccattatggtgcagaaagaggtcgcagaccgtatgcaggcaggtcccggcaagaaggattacggagctctgtcacttgcggtgcagtattattcgcaccctgagatagtggtaaatgtgccgccaagctgtttcatgccacagccaaaggtaggaagctctgttatatcgctcaagcgatacgaaaagccggtggttgacgtagatgatgaaaagctgatgttcaaaatcatcagggcatctttcaaccagcgcaggaaaactcttgcaaacgggctcaacaatttcggtggtatgggactgaccaaggagcagatacagcagagcatagaggctctcggagttcctgtaaatgtgcgtggtgaggctctaagccttgcacagtttgcacaattatcaaatataattggtgccgcaaaatagaaaaagcatgaataaatccatgcagacaggacatactatcatcagaacaattcagatgatggaggtaatgtcctatgaaaaaacaacaaattgcagcagcggcatgtctcgtggctggagccataggatttgcagcggtatattcaacacagaaacccgggaaagatgagataccaacagaaatttcacagacttcgtctatagttgagcctacagagaaaaagacaccacagaaaactacagaaaaagtagactcagagacaaaaatgggacaggaagaatcagctgcagggcagcaggaaaatcagcagcccacggaaaaacaactgcattttgtccctgaaaatgtgacaaactggcctgtaaagggagatgtgcttttgccgttttccatggacaagacggtttatttcccgacactcgaccagtatcagtataatcgtggcatggtaatacgtgcaaacgaaggagatgcggtatgctcagttaccgagggcaggattatagacatatatgacagcgcagagacaggctgcacagtagtgcaggatttaggagacggatatacggctacttacggacagcttgcaaatctaacctgcagtgaaggcgatgtgcttgaggcgggagaaacacttggaacagttggaaaggtgaccagatactatactgttgagggtaccaatgtgtattttgctatggaacaggatggaaaaccggtcaatcctatggactatttcggagatatatagaggcgaaaagtggagtttaacgaatacaatgagagtgtgaaaactggacaaatggcattcttgacaattacagaaaggacgccgagctcacaatcagatattgccatgagctgatagattacggagaaaagacagctgattcaaagctcttgggcttcggatactatcatcttgccatgatactttattgcctgaatgactacgataacatttttgatatcgtggtcagggcgatagatcatctggagaaggcgcagcgttgattattgagatggacagagcagacatggatgaaaattatacatatattgtaaggtgtgctgacggcacactttacaccggttggacaaatgacctgaaaaagcgcataaaagcgcataacgccgggaaaggcgccaaatatacaaagacacgcagacctgtggagctggtctatttcgagcactttgccacgaaagaggaggcaatgagcagggagtatcatataaaacagctcaagcgtgcacaaaagcaggctctgatagatgaaatgaataaaaataacaaaagtatttttacacaaaacggatagtcgaaaaataactaaaatgaccaaacgccagtgtgaggatacttatttttttgcgatttttgtaaaaaattgctaaaaaatgcccgggtttttcgttaatatatacagaaaagacaaaatcctcttgcaaaactacatgaaactgaataattcttgtgaaaacgttaccgcaaacattaccgaaaacaaccaaagatgtttgcagagacaattttaatattaaatcttttaggagggtttgaaatgaaaaagaaattagtgacagtattactcgcttcttcaatggtagcaacaatgcttgccggatgtggatcaggaagcggagacggaacagagaaaggctcatctgcaaagggaggcgatggctcagtttacatgttaaacttcaagccggagacagatcaggcatggcaggatcttgcagagaagtacacagatgagacaggcgtaaaggttacagtagtaacagcagccgacggacagtacaagacaacacttaagtctgagcttgctaagaaggatgctccaacaatcttcaatatcggaagcacagcagactgcgcagagtatgacaaatacatatatgacttaaaggacagcgagatttacaagcatcttacagataagtcacttgcacttgagtacaatggcaaggttgcatcagtagctaactgctatgagtgctacggaatcatctacaacaaggcaattcttgagaattactgcaaaaactactcaggagcagttatcaagtcagtagatgatatcaaggatcttgatacattagagaaggttgcaactgatatcaacgagcatgtagatgacatcaacaaagcttgtgacttacatcttacagaggcatttgcttcagcaggacttgacagcggatctaactggagattcacaggacatctcgcaggtctcgcactctactatgagttcaaggatgcaggatgtgatctcacagcaggacagaaggaagttacaggtaagtacatggacaacttcaagagagtttgggatatgtacacaaatacatcagcagcagacaaggctacacttgattcaggaagcttaaatgctgagtcagagcttggtatggaagaggctgtattctaccagaatggtgactgggagtacgctaacttcgcagatgacaacgagaacggatacacagttaagcagtctgacctttcaatgatgcctatctacttcggtgtagatgacgagaacgagggacttgcagttggtacagagaaccactggacagtaaacgctaaggcagatcagaaggatattgatgcaacacttgaattcctcaactgggtaatcacaagtgatgacggacgtgacgcaatcgttaataaaatgggtctttcagctccattcgatacattcacaggtgactatgagtcaaagaacgcttttgctaatgtagcatcagagcttgtaaaggaaggcaagacatcagtagcatggtcattcaacgcaacaccttcagtagatgactggagagctgatttcctcgctccactcacagagtacacagagcgtaatggttcatgggatgacgttgcaaaggcattctcagagaaatgggcttattactgggatcttcagaacgagcagtaaaattctctaaaagttagtaaaaaaaagtagtaaaagtggggtgagtggcagtcactcgccccatatttttttaagaaaggtatatttgttatggaaaagtcgattagaaaaaaattttggatcttcgctttaccgacaatggcagcatttacaataggatttattgtaccattcgtatatggtatcttcctttcattttgtaaattctccacagttacagactggaaatgggtgggatttaaaaattacacaaggatttttgttgtaaacggcactgtggatacaacctttattcattcaatctggtacacagcactatttacagtagtttcggtactgattatcaatatcgtatcatttgcaatagcaatggcgcttacaaaaggaatcagaggaacaaatcttttccgtacagtattcttccttccaaacctgatcggtggaatcgtactttcatatgtatggctgatgatttttaactctatcctgcagaactattcaaagacaatcgtaagctcagagtggtcagcattctggggacttatcgcagtagtatgctggcagcagattggatatatgatgattatctacatcgcaggtattcagaatataccgggtgagcttattgaggcagcaaagattgatggagccaacagatggcagctcttaaagagcgttattcttccaatgcttatgccgacaatcacaatctgtacattcctgacactgacaaacggcttcaagctgttcgaccagaacttagctcttacaggcggtaatccgggaaagatgtcagagctgcttgccttaaatatctacaacaccatgtatggaacaacaggatggcagggcgtaggtcaggcaaaggctgttatattctttataattgttgcaattatcgcacttgcacagaataagattactacaagcaaggaggtacaggactaatggcaaaacagaaaaaagcgcaggaagtcagtgccgtaagacaggccaagcacggttggataatcacattattattcactgttttatcagtactttggatttcaccaatctttatggtgttactcaattcatttaagagaaaagcctacatattcaagcatccgtttggaatcagcacagtatctatcactgagggctttgaagccttcaaggatggtatgtcaaggcttttctgtagcacattaaactacaagaatggtctcagaatgacacatttctgggactgctttggaaattcacttttcatcacagtcggctcagtagtacttattgtactctgctgctcaatgtgtgcatggtacatagttcgtgtaaagactaagggcacaaagcttatgtatacactttgccttttctctatgattgtaccattccagatggtaatgtttacattatcaaaatttgcaaatatgcttcatttatcaaatccactcggtatcatcattgtataccttggctttggagcaggacttgctgtgtttatgtttacaggatttgtaaagagtatctcattagagatcgaagaggcagctatgattgatggctgtacaccattacagatgtatttcagggtcgtatttccaatacttcgtcctacagcggtaacagtagcgatacttgaggcaatgtgggtatggaatgattaccttcttccatcactggttttaaacatcaaccagtacaaaaccataccaattgctattcagtacttaaagcagagccacggtatgattgactggggtgcaatgatggccatgctcgtgcttgcgattctgccaattgttatcttctatattgtatgtcagaagtacattatagagggtgtgctcgcaggagctgtaaagggttaatatagcttacaagaggatatagtttatgttatttaagccccacacttgttaagaaaacatgtggggcttaagctaaattagcaggttttatagttgtggatataatgagtgaaataaattatatcacatggatataatgtaaagggacgtatcgctgtccggacggggaaaacaatgacaattgtagatatagcaaaagaatcgggatactcagtaacaactgtatcccgagttttaaataacaggcaggatgtttctcctgcagcaaaagaaaccataatgaaaatagttgaggcacacaactttgtgccaaataacaatgcaaagaggctcaagcagaccatttccagaaatatttatctgctggtaaagggtacctcgaatatgctgtttgcaaacatagtcgaggaaatccagtcgataatagacagaacagactactctttgagcatcacatatctggatgaggacagtaatctaagcagtgtgactgaccgcatatgcagggaacgaaagccacttggaatcatctttcttggaggtagcagggtggatttctcggaggatacatcttcgtttaaggtgccgtgtgttatcgtgacaacatcggcagaaaactggagcatggaggagctgtcatctgttgctattgatgatgagaaggccggggaaacaatcgtcgactatctcatcgagcatggtcatacgaagatagcagagattggagccaatctggagctttcacagacagctattctgcgacacaacggatatctgaacagcttcaaaaagcatggcatcacacctgatgagcgttactatgagagagcgcgattctcatatgacagcgcatatcgtgcgatgaaaaagcttttggaaaagaatatagaaatcaccgcagtctatgcgatttccgatgtcatggcaatcggtgccataagggcaatacttgacaagggactcagggtgccggaagatatatctatcacaggctttgatggttcgacacttgcagagtactacaatcccaagattgtatctatcaggcagccgcacaaggatatggcggcacgcagcgtggaacttctttttagcatgattgatttgcataaaggctcatgtcatgagataataccatttgagctcacagagggcgagagtgttgctagaattgattaaagactatataatgtttgttgtaatctcacaatagttaccaacgaaggaattatttgggagcggtaatcagcttgttacattccggacatacaataaacgaggaggaatcgcgcgtggaagtgaataataagatgaagcacaccataaaggtcgcatgggccaaaggtttttcacagtttttagcactagcaggagcaatcctgctagtgtttgtgctatttaaatttgatgcaataatggcacagattatgcgtataataaatatactcatgccaattatcatggggattgtgctggcgtatctcataaatccgatggtagagttttatgacagaaagctaagcaattcgcttggcaaagccatagaaaagaagtgtggaaagagaccttctatgagagggttgtcaatacttataagtctggccataataatagccattattgtagtgctcatcatgatggtggtgccacagcttgtaagcaatatcacaaatgcggtcagtcttttaccggatcagatacaggaccttgtgaaaaaaatcacggagcttgccaaaaacaatgacagggcaaaggaaataattactgagctatacaataacggcataagctattttactgaatgggtaagggacaatatgctcggacaggttacctttgtgataaacggtattatgggaatctttggcacagcggtaaactgtcttgttgcattcatcgttgccatctatgtccttcttagcaaggataccttcaaacgccagactaaaaagctcgtgagcgcatttctgccggagcgccatatacaggtgctttcaagcatcttaaaagagagcgacaagatattcggtggttttatcagtggtaaaatcattgattcactcataatcggagctatctgtttcgtgtgctgcctgatactgcgcatgccgtatgtagcactcatcagcgtgatagtcggagtgaccaatgtcataccgttctttggaccgtacatcggagccataccaagcaccatactcatcatgctcgacagcccgtcaaagggtgtgatatttttgctgtttatcattatcttacagcaggtggacggcaatattatcggaccaaagatactcggtgagtccacaggactctcacctttctgggtggtatttgcaatcttccttggaaatggattatttggagtaatggggctgttcatcggagtaccgacatggggtgtcgtgtactacctgataaagagatatgtgaattatcgtgtgaggaagaaagaataaacgtactgttaaaaaataagttataaattttgaaaatagtacttgaatactggaaaatatgtgtatataatgtgtgaacgaggctttgaaaaagagcttgttcacacatttttttaatggattttctgcaggggtgaacctgctgggaaaagttattatgaattgaattttttgggagggcatttacacatgaagacagatatgaccaaaggcaatccaatgaaaattatactgctgttctcgattcctgttctgattggaaatctgtttcagcagttctataatatggtggacacgattatcgtggggcagtatctgggctcaaaggcgcttgcggcggttggttcgacgggctgtattatgtttctggtgcttggctttgcaaatggaatagcacagggctttggagttatggcaagtcatgcgtttggtgcgaaaaacgagaagcttttgaagcattatgtggcactggctataattcttacagttattgtctcagtggtgctcacaattcctacggtgcttgcgtcgagacagcttcttatctggctcaatacacctgatgatatacttgtcatggctgatgcgtacattaaggtcatttttgcgggaattttctgtaccatgtcctacaatgtggcttccggtcttttgcgaagcatcggagacagcaagacgccgctgtactttttgattttttcatctgtattgaatattgtgctggacatattctttatcgtggtggtgaaggcaggcacggcaggagctgcttatgcgacagttatctcgcagggaattgctgcagttttgtcatttatcgtgatgtttaagaagtatgatttgctgcgcaccagccgtgaggattattacatggactggagcggaatctggcgaatgctctcaatcggtctgcagatggcactcaactattcaatcactgctatcggaacgatgattttccaggctgcggtcaatgtgttcggttcgcaggtggtagctgcgtttaccgccgcatccaaggtcagcaatatcgcgacacagaccatgcctacacttggaacagccgctgcgacttactgcggacaaaatctcggtgcaggcagatacgacaggatatttaagggtatgaagtcatgctttttcatatgtataggctgcgcagttttagcggcagcaattaactgctttgtcggaccgtacatgataggctggtttatcacatcgcctacggcaactgacattgactgtgctatgaaatatctgaaaatcgcgagtgtcttcatgcttcctcttgcatggatttttgcatacagaaacggtctgcagggacttaacaagggtcttgtgcctatgcttagcggtgcgatggagcttgtgtcgagatggattgcaatacttgccctgtcaaagccatttggttacggcggtgtgtgctttgcagatccggcagcctggcttacaacaggaatactacttattgtgacctactatgtgtgggagatgcgcatgagaaagaagatacagataaaatagatttcacacaaattggtttattcgtggtacaattaagccacggataaatcaatttcatttacagagataaagaggcggattgcatgaattattatgagctttcaaacactgtcacccctgataccattggatacaaaaatggcttatggcagaaaagatatgtgcagatttacagagtattgattgttgtatggagtgttttgatattaagcttgttgtttggaatgttccatagggatgactatagttcaggaatgattaaatcatgtttattactcttttttgcaggtattatttttctggtgttgatgctgatcgctgttgttaatatatcagcgaaaaggacagagaattggagccttcaggacaggcatgattacaatttggctatgtacagaaccagatacaggaataataggcagcttcagtcagttgtgttgatagtgatggctaagcagcagcttcttatgtcaaactatgatctggccgcacaggctcttgcaatggttgatatcaattgtgtgaagctgccatatttaagagattattatttttgcaatgctgcagttttgttcctatgtgataagccgggctggcaggagtggctggataagtgctatgctgtgccggcgaatcaaaagcagatgacggacatgcagattggtgcattgtttttatcagaaaatgcaaaaatggatttgtgtcaggcaatttacgcagacaccaggataaagcataagtggccgacagcaattgtaattactgcgatattggtgttgtatgcaggaattttctatggagtaggaggcttactgtctcgaggatatcactatagatactggttcgagctgtcgtctgttctgataacatacgcaggctgtatggtcttgtcgctttactggataatcaggtggatattattcagtgacagcgtatctaaaaagtcagaaggggtaaggctattcagaaaagtaatactcatagtcatgtggctgtgtttgatggctgccatggttattaatctgataatttcattcatcggcatggatacggagaaaaaggtatatgcgaatggtcttatctgcatgagtacttcggatggatatagtactgatgaatattataacatcaaggttggacctttcctgagacgaaatttgacatttaaggaaacaataaagtttggacttataaacgatgatgacagcaccggagacagtggaaatgatgctggtgatagtggtgcaaatgacagtgaaaacagcactgagaataattcacagtcatacaatgacgcttctgaaaatacagaaaatgagaatgcaggaaatgagaacgctgacgaaagcctggatacagaaagcatggccgtatatgattacatgtcagctgcagggatactctcagccggggatgccggtattattcgcaacggttccacagctaaaggtactttttattctgttttcgaaaccggcgaggctgatggaaatacgtatgagaataggttagtttatgacagagtttccgaaaatggacagtgtgatttgtttgtttatgagcagttggttagtggctcagatacaaggctactgggattttatgctgtaaataaaaccacaaatgaggttttctcagcggatagaaactcatggggtggtgtgagcagcagggaatatcaggacgcaacaggagaaaattaggctggtacatgtcacataaacgatgtactagctggttgtctccctgcgaatcagcacaggcgctatctttttgtgcgttggcgccaaatctggctcaggctttctttgtttgcggttatccatctgcttgacgagcaaatccatggcggttcttgcgattacatctatctgctggccgatggtggtgattggaattatggcttcgttggcaattggtgaattgtcgaagccgactatctcatagctgtccggcaggcagccgtatttttgtatgacaagattcaaaaacatgttggcatatgtgtcgtttgccaggaatacccctttctttttatcaggatatttctcatctatattgttaaaaatcaccttcatctgagaaaataaatcgttgtacgaatcaccggatacgttcagactgagctcatagggaatattgtgctcggtacaggtgtcctcaaacgcacggattctgtcgtaagccgggacatactttggtacatctacattgacatggatgaggatatcacatttgtcacgtattaaaagagatgtggcctgaagcgcacccatatagttgtcggaggcgacactgcttatatgcatggattctcgctcgattgcgacaattggaatgtggtatgaagcaagcttttcagatgagagagtgtgacttagcacgataagaccctctatctgataagctaaaagttcatcaatgtagttttcttcctcagccgcccccttgtcactcataaagatgagaaacttatagtgatagttagcgtaagtggctaaaagctgtgtgagcatctcagagtagtagtgcaggtaaaggtttggcactattatgccgacaaactcgctcttaccgtttgcgagaacctttgcgagcttattcttcttatagccgagttcatcaagcgcacgggaaatcttttcctgattctccagtgtcagagagtccggatgattgaaatatcttgaaatcgttgtttttgaaaaatgtgtatattccgcaatatctgcaaatgtaacctgtttttttcccatgggatgtctccttataaaaattacttatattacaaatgtttataaacagtatacagcgcaatttccaaaatatcaacaaaaaagtaaccggttactttttttgagaaaagtattgacacagcataaatgatattgtattatcaaattacaaagtaaccggttattttaccggttacacaagagcgtaaattaagtaaaaaagacaaaatgtgaaagagagtggaggtcacagcaaatgaaagaaaaaaagcagtcattgaaaagcaaagtgacatatgtgaagaaaaactggatgttgtacatatttttccttatgccggcacttttactgacaattatattcaagtatgttccgatgggcggactgctcatagcattcaaggattacaatgtcataaagggtgtgctggggagtccatgggtcgggcttgaatatttcaagagatttttatcatcacctgattttatgaactaccttatgaatacgttaaaggtaagtatttacggattgttatggggatttccggtaccgatcatacttgcactgcttctgaatcgtattcgcaaagagggcatcaagaaaaagatacagcttctgatttacgcaccaaattttatttcagttattgtactttgtggtatggttcgtatgtttttatcaccaatcggacctatgaacaagctgctcggtatcagcacaaactggatgacaatgccggctgcattcaggacaatctacatagcgagcggcatctggcagggagcaggctgggcttcaatcatgtacacagcggcattatccaatgcgagcaaggagcttgaggaggcagcaagaatggacggcgcaaacatcttccagcagatgtggtatgttgagcttccggctattaagaatattatagtgatacagttcatcctgcaggcaggaaatattatgagtatcggtttcgagaaagcctatgcgttacagacagatatgaacttaccggcatcggaaattctttctacatatgtatacagaatcggacttttgaatggagactatggttattcaacagcggttggtcttttcaactcggtaatcaacgtaatattgctgattatagtcaatgcggttgtaaagaagctaaacgatggtgaaggaatctaggaggaaagtgcaatggaaaaagatatgaagacaaaaatcaaatattcacggactgataaaattgttcttggaattggatatacacttcttgggttgtttgtgcttgcaataattgttccgttagtatatgtagtgctggcatctttcatggatccgacagtacttaacaatcagggactgagcttcaacataaaggactggactattgatgcatacagacgagttctggaaaatgacatgatatggcgcggattttttaattcgtttttttactcaatagcgtttgcggcaatctcagtatttgtcacaatcctggcagcatatcctatgtctaaaaaggaatttgtcggaagaaaatttttcaatgtgatttttattatcacaatgttttttggaggaggaatgattcctacattcatccttataaatcagctccatatggtaaacaccgtatgggcaatcctcattccgggcgctttcaatgtgtggaatatgattttggcgagaacctattatcagtcagtgccaaatgagcttcgtgaggcatcagccatcgacggagcaaatgaaatacagcatttctttaagattatgcttccggtttgtaagccgattattgcggtgcttatgctttggtcatttgtaggaatgtggaacagctactttgatgcaatgatttacctgaatgacgcaaatctccagccattacagcttgtactgcgttcaattctcgtgcagaatacacctcagccgggcatgattgcagatatccagagtacagctgagatggcaaaggttgcagagcagctcaagtacgctacaattgttgtatcaagtttaccacttttgattatgtatccatttttccagaaatattttgataaaggaatcatggttggatctgttaagggctaacagaaaggatgagtatggatatgaaaaaaagaagcttcaaaaaattaattacactttcgcttacacttgcaatgctgacaggtgtggcaggctgtggaaagcagcagagcttaaatgccgagacaaatccggacacaccggtatcagatgtgcagtttcctctgaaggagaaggctgagctgtcatttatcacaagtgcaccggccacatccacacaggatcctaatgagaggactatcttcaagagaatggagaagcagaccaacgtgcatatcgactggacatgcttcgtttcagaccagttctctgacaagaagaatctggcattggcgcagtttggtaatctgccggatggactgtttaatgcaggtatgagtgattacgacctgctcagatatgcaaagcagggtattatcattccggttgagaatctgattgacaaatatatgcctaatcttcaggcagtttttgagaaatatcctgaatataggacaatgtgtaccgcaccggacggacatatctattcatttccttggatagagcagcttggtgcaggaaaagaggcaattcaggcaatcggagatataccttatatcaacaagaaatggcttgattatctgggacttgaggtgccgactactacagacgagctcgagcaggtgcttatcgcattcagagatcatgcagacgagcttgagaaagagtttgacattgagggcggtgtcattcctatgtcatttattataaacaacggtggccaggatccagccatcctcatgaacggctttggtgagggttatggtgatacaggtgaccactttgcagtaacagatgagggaaaagtcatctatactcctacacaggagggctacaaggagggtatcgagtggcttcacaagcttgtcacagaggatttgattgaccctgaggcatttacacaggagtggtcaacatatgtagcaaagggtaaaaaccacagatacgggctctgctttacatgggacattgcaaacattgacaataacacagattacgtcatgcttcctgctctcacaggacctgacggagtcagaaatatcaccagacagaataacagtgagacgagtggtttcgacagaggacgatgcgtactgacatcaagctgcagggatacggctttggcagccgcgtggattgatcagatgtatgctccaatccagtcaccacagaataactggggaacatacggcgagaaagattcgttcaacatctttgagatgagcacaaacgatgagggtggacagatgttaaagcatatggatctgggcgatcagtcaccggttgaggtgcgtgaggcgcagtctgtaaacggaccgcttgctgttttaaacgagtactatgatgtttatgtgacagagcctgcagatgccaagtggcgtcttgacaacatgcatgaggcttatctgaaggacatgaacagtaagtatgtctatccaaacgtgttcatgagcatagatgacaccaacaaggtgtcacagtacgacacagacatcaagaaatatgctgagcagaaaaaggccgactggatattaaacggcggcattgataaggaatgggattcataccttaagaaacttgataaatatggtttacaggattatctgaagataaagcagaaatattttgacagctatcagaaatcccttgagagtacgtcagagggcaaataggttactgttcataattctgtattaccggcaaagcaaacagaattggaggatttgaatgagcgaattattggaaaaagcaagaagctacgaggcaaaaaaaatagctgctacagataaagagagtaaacctttgtttcatatcagtgcaccggcaggatggattaatgatccgaatggattttctgtctataacggaaaaattcatctgttttatcagtactatccatatctgcgtgagtggggacctatgcattgggggcatagtacgacaagcgatatgattaaatgggagcagcttccgtgtgttctggcacctgacgaggaatatgataaaaaaggatgtttctcaggaagtgccattgaggcagatggtaagcatgtgcttgtatacacaggtgtcacaaggattaaacttcctgacggcagtgagcaggagagacagaaccagtgcatcgcatttggagacggacttaattatgtgaagcatgagaataatcctgttgtgacaggcgatatgcttcctgaaaactgcagcagaatcgatttccgtgaccctaaaatatggaaagaggatgacacatattatcttatagttggaagcaaggacttaaacaatgtgggacaggtagtgctctgctcttcaaaaaacctgaccgattggcagtttgagacaatccttgcggcaaacagcacaggcaaaataggtaccatgtgggagtgcccggacttctttgggctggaggataagcatgtgctcatctgttcaccgcagagtatgaaggcagacaaatatgagtttcataacggacacaactctgtatattttctgggggattatgataaagaaaatcatgtatttatcaaggaagagccgcacactcttgactatggcatggacttttatgcgccacagactacactgcttccggacggacgccgtgtgatgattgcctggatgaagtcatgggatgcatgtgtcgttcctgattcacaggattggcagggcatgatgacactgcctcgtgagcttgaaataaaagacggccgtatctggcagaagcctgttaaggaaatagaaaattatcgtgcaaataagtgtcattatacagataaaaaaatagactgctacacgacctttgatggcataaagggccgcactctcgacatgacagtggagctttcaggcgaggagtaccatgacttcactgttgaaatggcatgcgatgatgagtatagcacagcgtttacctacaacagagtcgcaggcgtgctcgagattgatcgtacctgctgtggcgtcacaaaggatgtcgtctgtgtcagaaaaattaaaatcgcagatacagacagaaagctaaagcttcgtttcatcatggacagacagtctatagagctctttatcaatgacggacagcaggtcgcaaccacagctatctgtacacctcttcaggcagacggaatcagctttaattgtgacggaagtgctgttgtggatattgaaaaatatgatataatatgatataattttataatatgaaagcatatcagtagagcatacaaataataaccggacaaattattggtccggttatttgtagaataatatacataatattttgacaggaaagaaagaggtacaatatggatgtagttgcattaggtgaattacttatagattttacagaaaacggtacaagtgcgcaggacaataagctttttgaggctaatccgggtggagctccatgtaacgtgcttgccatgcttcaaaagctcggtcatcagactgctttcatcggaaaagtgggacaggatgcgttcggaaggctgcttgttgatgccgtaaaggagcagggcatcgacacaacaggcgtgcgctatgatgataatgtccataccactcttgcatttgtccagaccgcagcagacggagacagagatttctcattttacagaaatccgggagcagatatgatgctgacagcggatgaggtggatttatcccttgtgagaaacgcaaaaattttccacttcggaagtctttcaatgacagataagatctgtgagaatgcgacaaagcatgcaatagctgccgcaaaagaggcaggcgtactgatttcctttgaccctaatctgcgcaaaccgctctggaagagcatggacgatgcaaaagagaagataagctggggcctgagtcagtgtgacatcttaaaaatatctgatgatgagattgaattcatgacaggcgaaaaggacataaagacaggtgtaaagaagctcatagatgagtatcacattccgtttatctgtgccaccatgggcaaaaacggaagtatggcattttttgacggacatatcgtggaggcagctccgttcctgcgagataacactgtcgagactacaggtgcaggagatactttctgtgcatgcctgcttcacgatgtgctggagcatggtatcaatgaccggaaggatgacgatgtgaaaaagatgctcacattcgcaaatgcagcagcttcgcttattaccacgagaaagggcgcacttcgcgtgatgcctgagaagggtgaggttgaggctgtgattaagtagttataatttaatacgataaaagagattatactcttcttaatctatgtttaaaaacgtgattaagaagagtatatttgtttcttgcagtgcataattgtattggctataatatcatatataaaacaatgatttgagactatacagggagtcagatatggtaaaaacgattggtattgggaaacaggattttgcttctgttatagaagataattgcttttttgtggacaaaacgagctttataaaggaatggtgggattcaaaggatgatgtgactctcatcacgcgtccgaggcgttttggaaaaacacttaatatgagcatgcttaactgctttttttcaaatcagtataaggacaggagcgatttgtttgattcattgtctatatgggaggatgaggactatcgaaaaattcagggtacttatcctgtgatttttatgagctttgcttcggttaaggccgacaatctgggagatgcaaaaatccagataaaagcacagatagaggctgtttacaaaaggcacagatatctgcttgagggggatactctgacagcagacgaaatagctgattttgaaggaacaaataccaggatgggtgatgctgagagtggattaaaattaaatattttgtgtgagtattttcatcgttactggggaaagaagacgataattatccttgatgagtatgatactcctatacaggaggcatatcttcatggatattggaatgagtttactgcatatataagaagcctgtttaatgcaacgttcaagacaaatccgtatatggagcgtgctattatgacaggaatcacgcgtgtatcaaaggaatcaattttttcagacctcaataatctgaatgtaataaccacgacctcaagcagttatgcaacgagctttggatttacagagaatgaagtttttgatgcaatggaagagtatggtctgtccggtgaaaaagatactgtaaaaaaatggtatgacggttttaaatttggaaatcacagtgatatttataatccatggtctataacgaattttctaaaggaaaaacagataagtccatactgggcatctaccagctcaaacggtctggtaaatcgtttgatcagaacagcatctgcagaaataaaatctatgatggaaacacttctggaaggcgattctgtggaggttagcattgacgaacaactggtgtttgaacagctcgataacgatgaaaatgccatttggagtcttttgcttgccagcggttatttaaaggttgattccttagaaaaaagaggtcttacgcttgaaccgtggtatcatctgagcattacaaatcttgaaaccgtaagtatgttttcaaatatgttcagaggatggtttaatgcctctgtttcgaattataatggattcataagggcattgcttagaggcaatgtaaaggaaatgaacatatacatgaatgaggtcgctttatctaccttcagcagctttgacagcggaaagcatccttcgggaaaatctgaaccggagagattttatcatggttttgtcttaggcctgctggtcgagcttagagataaatatgaagtgcagtcaaaccgtgaaagtggctatggcagatatgatgtgatgatcattccacgtgataaaaattcgcaggctgtaataatagaatttaaggttattgattcgcaagaggagacatcactggatatgactgcggatagtgctttgaagcagattgaagagaaaaattatgatgcaaagcttttggaacgaggatataaaagagaagcaattcaacattatggtttcgcatttgaaggaaagaaagtattgataaagaaggcacaaatctaaatgaaacaaaaattatcagttgcaccaacactcaaaaactacgacaagaaaaatctcccaaaggacattcttgcgggaatcatcatcatggcggtttcgattcctatatcgatgggctatgcgcagatatccgggctaccggcggtatatggcttgtatggctcggtattcccaatcatattgtttgctctgttttccacatcaccgcagtttatattcggtgtggatgctgctccggcggcgcttgtcggagcagcagtgcttggcatgggaatagaggcaggaagcaaagaggccatgacggttgtaccggtgtttacattttttgtggcactgtggcttttggcattttacttcatgaatgccggaaagctggtgaactacatatctgcgccggttatgggcggatttatcacaggcatatgtactacaatcatactgatgcaggcgccaaagctcatgggctctgcggcaggaaccggagagctttttgaactgtctgagcatatatgggaggcattacaccacataaatgcagccgcacttgtcatggggattgtagcgcttgccattttggttgtgagtaagaggcttgttccaaagtttcctatggcggttgtgctcatggtaacaggcgcgctttttacatattttggaccggtaaaggagtggggagtgccgactctttcagcagttgagcccggcatgccgcggtggtatataccggatttcgaggcagttttttcagttcaaaaggcctcagaggtaatagttttaagtctttcggttgctgttgtcatcatggcagagacacttctggcagaaaacaatttcgcacagaaaaacggatacagaatagatgataacacggagcttttggcattttccataggaaatatggctgcggcttttacgggctgctgtccgataaacggttcagtgtcacgaactgcgatgagcgagcagtacgagggtaagacacagctcacagggcttgttgcaggcgtttccatgatagcagtgcttcttttttgcacaggctttataggatatctgccggttccggtgctcacggcgattgtcatatcagcgctcatgggtgccacggagtttcatctggcaaagagactgtggaaggtcagcaggacagaatttttcatatttgttggtgcttttttcggagtacttattctgggtacgataaacggagttttgataggaatcattttgtcttttgccgagatgataatcagaagcgcaaagccggccacctgctttctcggtgtgcagccgggacacagtcatttccgcgatatcagggagagcacaaacatccacgagattgacggtgtgattatttacagattttcgagcggcctgttttttgcaaatgcaaaggtacttgtgcgtgatattgaggaccacctaaagcatgatacaaaagctgtcataatcgatgccggagctatcggaagtattgatatcacaggagctgacagcatagagtcactttaccgctcactgaaacaaaaaggtgtaaagctatacataacagagcacattgcagagctcaacgagcaactcaggaagctgggcttaggttatttaattgagcagggctgtgtcagaaggacaatacatattgcgctaaaggatatgggaataaacagaccttatccgcttgagggtggcgtagataacgaggagcgcagtgcctcaagaaagcgtgctgacaacagagtgcaggagtttgtctgggcgtttggcgccgagagtgaggagcagattgaaaagcagataaagcttcagatagaacagctcaaaaagacaaaggatatagaggaaatcatgcatggccgctgggcgcatatggatgagtttgaccaggatgagtggctggagcatctggaggagcatctgaaagaaatcgtcaacatatcaggaaaggatgtgcacacgcttgcggcagatatcgagatgcaccgtcgcgaggtgcatgagcgtatagcaagagagcatccggagcttgcagagcggtttgcacagaggagacacctgcttgataagcatctgaaggagagaaggcctgaggtctacaggattatcgtgcagctaagggaggacaacaagcataaatgaacataaaccagacactcaaacaatactttggctacgacagtcttagaacagggcaggaggagctcataaacggcatacttgcagggcacgatgtgctcggtatcatgccgacaggcgcaggaaaatcgctgtgctaccagcttccggcgcttatgcttaaaggaattacgcttgtcatttcgccacttatctcgcttatgtcagatcaggtcaaggctttaaaccaggcaggagtgcatgccgcctatatcaacagctcactgaccgaaaaccagataaggatggcactttcgtatgcctcacaggggcgatacaagataatctatgtcgctccggagcgcctcaacacgccgcgttttctggattttgcctgcaacgcggacatatcgatgctgacagttgatgaggcacactgtatatcgcagtggggacaggatttcagaccgagctatctggaaattgccggatttttaacgagacttccaagacgaccgatagtcagtgcgtttacagcgaccgccacggagcgcgtgaaaaatgatatagtggcttcgcttggacttaacaatccggttactatggtgactgggtttgacagacctaacctgtttttcagggttgttacaagaaagggaggcagccagaaggacaacagtataatcaattatgtgaaaaagcatgaggacgaaagtggaataatatactgcgcaacgaaaaagaatgtggataagctgtatactcttttaaatgagcagggtatttcggcgggccgttaccacgcagggctttcaaatgatgaacgtaagcagaatcaggaggattttacatacgacagaatccgtgtgatggttgccacaaacgcatttggaatgggaatcgacaagtcaaatgtgagatatgtgctgcattacaacatgccacagagcctcgagtattactatcaggaggccggaagagcgggacgagacggtgaggaagcggaatgtgtgctgtttttctcaaagcaggatatcatgataaacaagttccttctgcagaataaggcttcagcaggcgatgtggcatccgacatgcaaaagacagccaatgaccaaagaaagctgcagcagatgataaattactgtgagacggacaaatgcctgagagagtttatactttcatatttcggagatacaacgccatgcatctgcaacaaatgcagcaactgtgtggttgtggaggatgaagaggaggagacatacgttgaaaccggcaaaaagcgcaaaaaggcagcacagcttgcagggcttaacgagcttggtgttgcgctatttgaaaagctgcgcagcgtgcgtacagagctggctgcagaaaagtcggtgcctccgtatatcatctgctctgacaagaccttaaaggatatgtgcgcaaagctgccgcgggataaggaacagcttgccgatgtgtacggcatgggtgagcagaagatacaaaattatggtgaagcgtttgtgacggcggtaaattcatttgttgcagataacccaaatccatcaggcagcacgacaggtgaaagaccacagactgttttaagcgatgaggaggctgctgaaaccggcagcacgagaaaaaagaagcttccgttttacatcgagccacagaggcttgatgaggtagagctcaccgacaaatgcaggcttacagagcttacgaacaaaataaatgagctgtgtcctgcggataaggagcacaaaaagcttgcagcctcgtttataaacgagcttcttattgcagagggatatctggaggaagttacagaagacgggaacaagataaagcgtgtcaccgaaaagggacgaagcgtagggatagatgaggaagagcgcaaggcaaaatttggtggaagctattacgctatcacccattcgaagcagagtcagcaggtgataatagaaatgctgaaaaaacactatagcggaattaaaccataggtgtaaatggactttagataaactggatatataaatttatataaaattggatatatacttgatgccacataagagtattatatagtttaattgtaatatttaggaggcattttatgagaaacgaaaaagttcaaaaactcacacttacagcacttatggcagctttatcatatgtcatattcacatttttacagattaaggtcacattaccgggtggcagcgccacatcctttcaccttggcaacgcagtcgtagtacttgcagctttgctcttaggcggagtatatggaggaatcggtggagcaatcggaatgacaatcggtgatttacttgacccgatatatatcaccggagcaccaaagacatttttcctcaagcttatgattggtgttatcaccggtcttgtagcacacaagcttggaaagattacatattcaaccgacaagaagcatgtatttaaatggacagtccttgcagcatgtgcaggaatgctcttcaactttatttttgacccgattataagctatttctacgatatgcttatcctcggaaagccgatggcacagctcaaaatcgcatggagcgtgaccacaacaggagtcaatgcagtgatatcggtgattgctgcaacaatcgtgtatgtggcactgagaccggtgctcatcaaggcaaatctgtttttcaagattggcaaagaaaaataatagttacataatttcataaaaaaaatccacatacatcatgttgaaagagatgtatgtggatttttttatgattttattgccgaaacaaaatcatgtattttttccggattcttacccgctccgttatcattttctacacctgaggatacatcaactccgtcaggatgcacggcttcaattgccatgcgcacattgtctggatttaagccacctgcgagcagcagaagcttttcatcgcgggggatattgtcaaccagcttccagtcaaaggtttttccactgccgggctcaatggcatcaaacacatagcctgcgatgcgtgaatcgttgtgatacttttcatagctgcccatatcagagacattgaaggctttaagaatcgggatagctattgctgcctgcgcctctgtctccggaatttccccatgtatctggacatagtcaaagcctgcagcctcaatctgtctgacctgctctatggatggcgaaacgacaacggcgactcttttgatggaagcatcaagggctgccataatctcctttgcctgttcgatggatatatttctcttactctttggaaaaaataacaccatacccgcaaaatcaacgtgattttcgttgagataccgtgcttcggcaggtgaagtcagaccgcagatttttattttggtgctggaatttgtatttatattattatgactaatttctttatctgtattttgtgtattcatatcctaagaatagcattgttgcaggttaatcgcaagtggattgaccataaattgttgggtgttgttcgcaagccgcggataccatggcgcacacactatcccacgttcgctacgctacgcagctaagagactgtacgaattgtgccaaagattttcttaacttgacgaaaccgtcgaaactcgccatccatggctcgatttctccttgcctcggcgtccatgcctcggcatttctgcgttacatagcacaattctacagtctctaagcagcttcgctattcgcttacatgggatagtgtgtgcgccatggtacccgcggcttgcgaatagagtactacaaacaacggttaatacggattgcatgcgcaaatatgagatgttataatgcaattgaattaataaaaacaacaaaatgggagataacaattatgtcaacagaagagattaaagaatatatcggaacacagctcaaagcactcacatcaatagcaagccctacaggtttcacaaaaaatgccacagactatctgatgaagcagcttgaggctatgggatatgcgccacagctttcaaataaaggaaatgtcagcgtagaaatcggtggagagggcgcacctttggtattggcagcgcatgtggacacacttggagccatggttcgctcaataaaggataacggacgtttgcgcccgacaactatcggtggtcatcagtggagcacagcagatggagaaaactgcatggtttttacgcgtgatggcagaatgtacacaggcgtggtgctaaatacagagccatcggcacatgtggcagacgaaaaggttgagacaaaggaagagaatatggaaatcctgctcgataaaaatgtaaatgacaagcagggcgtagcggcacttggcatccagacaggggatattatcgccatggatccacgtacagtcatcacggagagcggctatatcaagagccgtttccttgatgataagctgtcagccgccatcttactcggtgtggctcatgccgtaaaggaggatggctggaagctaaaccgcaaggtcacactgctctttacggtttatgaggaggtaggtcacggcggaagctttgtaccggctgatacggaggagatgatttccgtagacatgggctgcgttggagccgacctcggctgtacggagcatatggtttcaatctgtgctaaggactcaggcggaccttataactatgagcttgttacagagctttcaaatctggcaaagagcgaggggcttgactatgcaatcgatgtttatccgcactacggctctgatgttgaggcaacactgcacagcggatatgatattcgtcatgggcttatcggtgcaggagtttatgcatcacataactatgaacgctcacatatggatggcgtggagaatacttataagcttttgaaaaaatatattacaaaatagtatcattgtgatacattatttcatgtactcaaacaaagtaggagagaggtaaatacaccatgaatttaaaaaaagttcatcatattgccattattgggagcgactatgagaaatcaaagcacttttatgtggatctgttaggtttttctattattcgagaaaattacagaccggaacgtgatgattataaaattgatcttcaactcgatgagatagaattagaactttttatcattaaaaattgtccgaagcgtccaagttatccagaggcttacggtctcaggcatcttgcctttgctgtagactcggtcgatgatactgtaagagaattgaataaaaggggcatcataactgagccgattagactcgatacttacacaggcaaaagaatgacattctttcatgatcctgacaatctacccttggaaattcacgaataaagtattgcagttaaaagatgtgctctggtttgggctgtgattttataaattctaatttttgaaactgagaaatcggaatttcaggaggtgtttttatgccacaaatgaataagggaggaaaatttattttcgggaaatcactcattcggacggatggaacattgcggattccaccgcaggcaatggaagaatatcatattgcagatgaaggaaaagtatatctttttaccggaagtaagattaccggtggcttctgcgtcacccggaaaggccttttgcatccgtcaaaacttggtcacattttggacgatactccaccgttgcttgactactcagcaggttctggcgaatttatcaaatacaaggggcgttcctactgctgggtagagatttcacaggaggggcaaattcttcttacgaagaaaatgatggattttttgaaggtgagacccggaatggagctgctctctatccgcagtagcgatatcgcgtttacgatgggagctaaaggaccgctattggaaaaagcagaaaactatgatggtgaaattccgcttttttaagtgtaacaattggaagttacggaggaaacataatggaatacagaaaatttgataatataataatagcgagaattgacaaaggggaggagattttggagcaactgaaagcaattgccataactgagaatataaagcttgccagtattaatgctcttggagctatcaatgatttcacagtcggagtatacaagacagatgagaagaaatattactcaaacagttttaagggatattatgaaattacatcgctgacaggtacaatcaatacaatggatggagaatattatgcacatcttcatttgagtgccggtgatgaaaaaggtgaagtgtttgggggacatctgaacagagctgttgtgagtgcaacttgcgagctcgtgattacggtaattgatggaaaagttgatagagtttatgatgaagaaacaggacttaatgtattcaatttctgaacactttttggtttttcataatagtatctacaactgttgttatttttatttgtggtcgatattatttttcaatccagacatacaggcaggaggttgctgaccattttaatgaactggacgaagataacagaagatttgttgtcaggggagacatcaaacagtggaatcaaatgttggcagagacagcacataatgcaggagttattacgaatgaggaatttgcgatttttcaaaatgccggatatatgggactatatggtggattagatgttgaaggtattttggcagcagtttatcagagtgtgtttggtggagatgtatatctgtcattagaggaaaaagtagctaatttattatttaatgaaattggtaactcgcaagttgtttaatggagaatgtatgaagaagagaataacgcttattgttttttcggtgctaataattggtttccactgcttttttatttaggagtagaaaactgcgccacagccttggcaggccatcgcgcagcgattttgttcaattataatttgtcatacgccttttatctatgtcatttatcatttttactgcatcagcttctgaagtattatgcagcttacagatacgctgtattttttccggcatatccccatggatatacacattcaatacatcatccctgtctttcaaaatataatcagcatttcttccaatgatcacacatggctctttttctgccagatccaaaatcacttttctctgtgcctcatataccatatcttctactgattttcctgtaatatcacgaccggtaaatgcatatgcaaaaatccctttcttgggggacagctcggcattttccttaatatactccggtgccagtcctgactcttttgcaatctgtccaattatttccttgtcataatatttaattccaagtttctttgcgacttcttctccgataaaacgtccgccacttccaaactctctgcttatcgtaataattctctttgtcatggcttatgcctccttaatttaagctttccactttatttttattgattctctttaaaaataaatatcctacaatacaagcagtcacctccgtgattggaaatgcccaccagatcagcgaaactccaatatgtccgcctcttacaaaaaatgagaagatgcatgccaaaggtaatataattataagctgtctgagcagtgaaatcacaagcgattccataccaccatcaagcgcctggtaaataccctgatatgccacatttattccggcaaaaataaagctgatggaaataattctcattgccccgataaaatattctcttgatgctcctgcattgaacaaagcagcaaattctcccgggaaaatttctgtaatcgctactcctatgaccataagcacaatcgtataaagcaatccatacctgatgccatccttaattctctttttgctgtgcattccatatgaaaaagctataattggtgtaattgcatcccttagtccgaatgcaaggaacaatacaaactgctgcaccttataaaacaaaccatatgcagtctgcgccgaaggactaaatttcaaaataagattcatcacataaaccataattgacatcagagcctgtgcaataatagccggaagtccaattgcataaatttccttgattattcctccatcaggcttcatatactttgtatcatgctcaaattccctgttcagcttcatatgaaacacaaacagcagtattgcagacacaacctgaccgataacagttgcatatgcggcgcccttaactcccatttccggaaccggtccaataccataaatcataataggatcaagaataatatttaccactgctccaactacctgaccaattgtagaatagagagaacgtccggttgcctgcagcagcttttcaaatagtgaaaagaaaataattccaaatgaaatcacacagcatattctcaagtaatttgttcccattgaaataacctgaggatcaacggtctgtgatgaaatataagctttaactccaaaaattccaaacaacaggcatactatataaattattgcaccaagaaataaactgtttcctgcaacctttgcagcttttttactatttccctgaccaagtgttcttgcaagaagtgcattggttcccactcctgttccaattccaactgctaccataagcatctgaaccggaaataccagtgtcagcgcattaagtgctgcctcacttcctgacctcatatttcctacaaaggcgctgtctacaatattgtaaactgcctgcaatgccatagataaaatcatcggtattcccatctgtaccatgagcttatttaccggcatctccttcatcttgttactttctgccatcttaacttattcctccttttctgcataaaaaaagtgcgctcttatctcataagctggacttacgctgataagctacacactttataatgcactatatattttaatgatgtgcgacagcaggtgcacaaaaaaagagcagctaaactggatttacgctagtctgctactcgttcataggctattatatttttatttttgaaaaaagtcaaatgatttttgagcgataatatagcttttgcatttacacttaaatttaaaattcaaaccgcctcttcctggataccgacagattttccttcttaaatctatgcaaaatcacactgccctcactccattcatcctgtgctgaaagtgcaatcatatcagtgacagccaggacatctgcgataaaattctcctcatcgtctttaagctccagaaaactctgcagcaaaaccaaatccctttttcttatgataagctcagacagcctttttttatgattgacaatatactccaaaaactgctgcctagcttcttttgaaagctcatacgcataaataagcctgtaaaaagccatatctaaaaggtcatcctcactctcctgcgcaatcgcctctgaaaatatttcatcatactgcttccacacaaacacgcggtccataaaagcctgtctggcgcgaaagccttctccgttcatgttcagcttaaaaatatgagcaggaccaatctcatcatatgtctggtcgtactcgaaaaaacatgcctgcgcaatcgcatttccatcactgacagcccatctaaccctcacaagagtgcttatctgtgaaagaatctgcttaagacacgacttatccttcggtgagcctctcatcacaagcatataaagttttgtgcagttcatgaaagcgtcaccatctacatcacatatgtcggatggcagctcaagcgcagacagccttgaacaattataaaagcacagcctgccaattttttgcattccgtccggcaatatgaccctctcgatataatcatcacacagctccgtcatatcaggacgcagaatatcatcaatcccaagctctgttttcaatttttcaggcatgctcttgaaagaaaagcaatactccgcaagctccgtcactctcatgccgtcaagcatatccggcaccacacacaccggatttttcccatacatatgaagaagcctaatgcaatcatcattaagcctctcatatacacatatattattgttatcctttgtaatctttaaatctgtcattttatttctttaactcttaaaaatttcacacagctgcaagccttatccaagtctcaataagtcatttattgtattcttaaaatcataaaacaaatcaatatatttttcaacaattgtattacaatgtgtccttataatctcgcaatcatagtcatgtgcaagttcatttctaaccttaagcatatccatccacgcatcatcagaaatcagctttgccttgaaggattcacgtaacacctctcgcggggattctgtaacaaacccggttatcgaataatactgtaccagaatatctttcattaccttccacgataaatcaaaagtaatgctaaatttagcacctgtcccactcaaaacaaacgaatcggtaaggtctctctgcctggcctcagctaacgcatctagtgaattacaaaaagatttaaaacgtctctcaaattttgcgtccatactgtctgcacccctgcttataacctcttcaaccttcactaacctaacctcatataaaaataatctgcactacttatcagttagtttatcacaattcctacattatttccaccacaacgtaagggacgccaccgcggtacccgcggcagcgccccttactacatccacaaacagtgaaatagctaaatctactcaagcagattcttcatactgttcacactgataagaattgtcgatccattgtgcaaaagtgctgtcgtagtcggcggaagcacacctgccacaccaagagcaataagccctgagttaaaaccaacaatctttcgatagttgctctttatacgtttcataagagcattacttatatatttaagagttacaatctggtagagatcgtcagagcccaccgtaatatcagcaatctcgcgtgcaatttcagcgccgtcactgattgcaataccgacatttgccgctgaaagagccggtgaatcatttatgccgtcaccaatcataatgacctttctgcccttagccttttctttctccacaaaggcagccttgtcctcaggtaaaacctcggcgtaatattcatctacacctacttttttcgcaatgacagaagctgtacgctcactgtcgcctgtcatcatgacaacctttgatatgcccgccttctttaatgaagtaacaaccgccgctgcctcatcacgcagaggatcctcaatacagataactgccgaaagcttaccctcaatagccagatacaggtgcgaataatacagcggaagcgactcaaacagtggctcctttcctgcaggaacaacacatttttcatcctcaaagacgaaatgatagcttccgatgacagtacgcttgccattgattgaggttgcaattccatgagccacaatatactccacctttgtatgcatttcctcgtgggaaagccccttcttagaagcagcgtctaccactgcctttgccatggaatgagggaaatgctcctccagacaggctgctacacgaagcatgtcatcagatgaatactcatcattgaagttcaccacatcaaccacagtcggatgtgcctttgtgagtgtaccggtcttgtcaaagacgattgtatcagcctccgcaacagcctcaaggaactttcctccctttactgttacgttataaaggcttgcctctctgatagcagaaagcacagagattggcatagcaagcttgagtgcacagcagaaatccaccatgagaattgacatagcctttgtcacattccttgtcagaagatatgtaagtcctgtagctccaagcgtccacggaacaagcttgtcagcatagtgctcagccttgccctccagctcggatttaagcttttctgactcctctatcatagtaacaatctggtcaaaacggttgtttccttcaacctccttgaccctgatagtaatctcgccctcctcgacaacagtgcctgcaaacacagtattgccgacagttctttgaaccggaaccgactcacctgtcagggaagcctgattgaccatcgcatcgccatctaagacctctccgtcgaacggtatgacatttcccatgtggacaacaaccttgtcgcccttttcaatctttgaagactcaactagtatctcctgattctcaggtgtcttgagccataccttgctcacattaagtgacatgcttctggctaaatcatcaacagacttcttgtgcgtccattcctccaaaagctcacctattccaagcagaaacataatagagcttgcggtagaaaaatccttagtaataagagaaaccgtgatggcagtcgcatcaagcaccggcacctcaatttttctctgcagcagacacttaagcccaattccaatatactttacagatcgtccaatagtaagcgctatcctgattggcaaaggcagcaggagctttttactataatgccagacaacacttccgataagcttttcctgatatgaattattaagctctcttcctgatgtcttgataacagtctgtggcacattggcgctctcataatgaaagtggcgaagcagctctataatctgctctctgtctcctacatactcaatcacagcatcagccgtcctgtcataaacctttacaaaggtaacattcctgtgattgtgaatcacataaagcagagtgtctgcctgctcatatgtcatgcggtactgctccatatgaacacgcatacggcctcttgactcatgcttaatcgtaaatttcatatgaccgcctcttatcttctatacctcagcagtctctgctgtaacctcagcctgctcatcagccttagcacactcgcatacatcctcagatgcatccgaaaccttagcagcctcagccttagcctcgcgctcctcgttgatgctcttagcctcagcaagaatatcctctgcattctcctgaacagtattaacagtcttcataacacaatccttagcacgaagcgctgctgctgtacactgtgtataagcacgcttagcatccttgcttgataaaatcttgatacctgctgtaccaaaagcaacacctgctgcgaataaacctgaagccttccaattaaatgacataatgttttcctcctgtatatttacaaaaaatctaattaaagtttacttacaagaaacattatatttcccgaaaatactgttattcaagcctaatctcatacagttcttgctaattcatgccctcaaacgcccttattatgcgtcctcccggacttattgataaagtttatcacttcaattgatacatacacaaaagcataacaacatcgaatggactcgaaaaaacgcactatgtatactttcaagaaggaagttataaacatctttgcaaatataccatatctattaactgtacaccacactcataaattgggtgatcataattgtccgtaaagaaattcggaatattcatctgcatatttactggcaagaaaatcaattagtgctttcccatagccctttctctgattttcatatccattactccgtcaaacttgaattaatcgatttctttattatctaatctgttagtaatctatccaacagcatctgcctattatttataaacatttctgttacctggtaactctctgtatcctcatagacatttgatgaatttaaagaaaaaattataggtaaaaactaacattaatcgttattctttgcttattctaaactctaaaatgtatatacataaattaacaaataacagaacattaaagcagtcgattagccccctgtcaagtagacaaataaaaaatctaagtttatagatatccgccacatttgactcggtgtggcggatatattccatcagctgtccgttggtatggtaatcactttttatcctcattctttctgcttttatatcagcactttgtaatctgtaatctcctcataactcttatctgcctcggcttcattcattggtcgactctgtataagaatcaaataatacccattccaccgaatcaaagttgtcagggttatccctcaagaatctattaactgtacgaactgcaatcttcgttttcaactccaacatgcttgcacagccctcaaaaactttgcttatttttgatttctatacgtccttggggagcgcaatcaaaaacttgtcataggcttttttaattttttggcaattgcaaatattacatttgcaataatcatcactatgtaactgatcaatcttaaacagtttattggataagagcattttgtactcttttatattatctgaatctcctttgattttctcaataagcaaagtcatagctgataatatatctttattggtgttagacttgttcttatatttctccattatttctttaaccgaatccaattttccacacataatataatactcaaacttgagcaaatataaattatagtatttaaaaatcgaattgtacgaaaatctatgtttaaagaacggaattattgtgttgcttgccgaactacagttattggaaataaagtctatacagtcctttaattcattttctgtaatatcatcggttctctccagaagattagaaatgtcattcaattctccctgccatctcatcttatatgctatatcatcgtatatctgacttacctgtggaataaggtatcttaccacattaaagcccttttctttatatactttgaaataaacttcatcgctaatctctaataatttgttagtataaaactctagtgcctcactatttgaatggaattctggccatttttcaaacttgtattcagatattcctccattgaccacatctactggataatatccgtctccagtatgaagaatagactctaagttctttttgcgccataaagaatcatccaaatatgtcttttctttcatataatccgattgattgtttcttcttccctgaaacatttctgtcaggcatcgctctgttgctacattgatgtcaaagtgagcaccaaatttcacaaaatatgtgttgttttctttattctcaaatataacgctaattacagggtatccttttcccaaagaagcgtcatatattgtaacctctagcccggttttttctttaacttcaacaatttcttccagcaacctatctttaaaaatacttccatctgctgggatttgaggcattattatttctttgtttatgatttctttattgcaatacctttcaaacacttcagacaatgcctgagtctttgcttcctctaatgtatttccaaaagccattccattggttccgaacaatacatccagcacactcactggaaaatactttgtcttttctccattaatagtattaaatggctccataacaagcttgctagaaaatgcagtaaaatacttctgcacatccagtgcactatgataatcacaattacgcagtcccaattctgacagatgattcttatattcagcctcatcaaaaagaacctcatcctcaaagaaaattgtatctctttcctttgaatatctatcatagtaattgtatctgaaaagtacttttgtaagtactctctccatcaattcaccatatgcgctcgcccttgcaaattctagagaagatccttttccattaacaaacagattagtattttctaccacaagtgtcactgcgtaacagctccccatgcatgtagtgttagtctcctcaacatgaatatcttttccccttaaaaattcctgaacagcattaattgtgtcagttggtcttctgtctttccatttgctttcataactcataattatctcacggcaaactaccgttctcctttctaattagcacacactctacagtttacatttatcccaaatgcctcctgatccgcagacatatcgaatttatcaagcgtaaaaacctttccttttgacagcgtattatcttgcatcatacattcgattaattcaggaaaaagcttgattacttctattttcaaaagagaaattaataaatcagatggtgttctatttgttaccattttatcttttgcataatcattgcacataaggcatccaaactgatttccataaagagcagggcctatccaaatatgactaaaatcctcacatatgtataaacgtgcaaggctattttcaaccgctattctttcaaaactctcaatcttctctgcatcaacttcattcaggttaataacatatagattgttttcttttaaattactatcatcaagtgtttccgcgctattccaatttaattcctcgaagcatttttcaaggtcagttttcccaacataaatgatctctgaatcccaaacaacatgcttaacagctgcaaaaaatgcccacttttccatttcatatgcatctctattaaggttaataaattcattgatgcaatcgtattttttcttttcatctaaatatgcaaattcatctacttgaacgaaaaattgcattatagaattatttccagttatcagcttccaatatctgctccatacttcatcaagaaggtcagtatttattggattattcaaaagttcagctacactatattcagtcgatcctttaatattaaaaacattaatcatcctctttgtcttaatatcataaaatgctatattatctttttcattaataacgctatatccatcgcgaataatataatacattttgccccccttttccttatcccactgctgccatatacaagcacactctgtcatgatcaagcttcagcattttttttacctccaaatcataaaacccaccaattgggactgttgagtagcccaattttgtagataccatctgaagattgctacacatatgtccagcctctagaagcactaatctgtatgaaagcattccatactttttaaagatcacttcaaaattagccacaaagaacaaaataattttgcttttctcaaaactttggacaccaaattttgttgttgaagtcaagccattcactttgcaaacatctgtatccgcaacataaactaaacgggagttatctgcatcatatttccatattccaccgtttaactcatcctcaacatcatttatgtatatatatggttcaacagaatataacgctcccgcagatgcatatgttttaagattgacccagaactctccaaactttcttctttggcttatgccaaatgcctttgttaacaaagcagataactgttctctattcattggagttccaaattgccagctcgttcttctctgttcgagaatcttaaaaaattcgtcctcgttctcttttaattcagcggggtcaatttctacgattctgctatcttcctcattatccttagtcaacaaattatcaattactggaataatatggttgactgacatatttgacttatggtgcatagtagatctatgaaaattcagaatgttgttaatattatgatattcatcctttactgttttccattttttcaccaagccactctcccatttctcttgtaatgatgtactcaaaatccggagtgactgatattctattattcatcatatgaatctgtgacgaagtaatatataatcgctccatatctgttgtcaattctctcattttgccaaaaccattgcacatctcttcaagttcattatccataaaactaagatctattctacctttttcaatgctgtcaaacacggaacatattacttctttttttatcttaggttcgttaattaccattttcttccagtatgtctggtatgaattcaaaaagtccaatgtcaatccattgttgtaacacaataatttatagattatgtaagaggacaacacgattctcttattaattcccttaacattcttaaagatgcttagcgccagtcttgaggaatgataaaaaatattctctgatatctccatcagttttccgtcgccatatcgctcatattcaggaatatagtcttcataaaaacaggttccagattcatgccatggcaacttagatgaatcttcttcttttccatcaaaactaatcctgctatagtaaatatccctatccagattgtctactttgttattctcaaagaatttatctacggctccttctatctcttctttaatattctcacctgagtcatgaaaacgaagccttatatgagggccgcctctccaatatttaataaaaaaccatccttctgtcattctgtctaatattggttctaactccatcataagcttttcctgaaactcaatattatgacagtatatatataacgattcccatttactcattttcttctctctttatctcatcaacattttcagcgaatcattcattgatttgccaatcactataaaatatcctggatcatatgaatcagattccataagtcggttcttcatatacaaatcattcatattcttcataggacgtgctgacaattcctttgttccgcatatatttgaaattctctgcgcaatttctcccattttaatgtaggtatactgataccatatttcattcatttcatatagtttgcagttcgtgtacatgattactccaacagaaacattcttaagatctacatagtccaaagaatcatgtggaaggctgttcatatcgatgtcatttagttccttagtattcacatggtctctctttatctcatatacgcgtactgaatcagtgttcattaccaactgaacacaaatcaagtcatccgtcacatctgcaagtgataatttaacactatcaataatttcatctagcacatcatcaggacactcatatggaaaaaatgaatatccctgggcagactgcgagctagttctcataagtagctctttgaccttcacgctagttctgatatttgaaaacttttccactatcggaactttagactccaaaaccttatcaataaacttgtctaccagcgatccgcttttgtttccagtatatgtgtcagagaatttcactttattgacattctcattgtcccataggttctcttgctttttcacaaaaaagtccgttatatccagctttacaagaggcactatctgatatggctttggcagtctgagcatatcgattgaagtgcatggattataatctaacgtaaacgacaacttctcctcaattgaaaagcactttatattctctataaaatgaccagcatccaaaagggataatatatatccaaaatcgccgtatttcctgcctatttttcccctgttacaaataatgtacatattggcaacaaagcttacttcattacatttttctctacttattaagtcaaactcattttgcgtgagattgtagataaagatttttctactatgattgcctactatctcaaggactatctcgttactgttaaaccctctggctgaggcatatgtagtgtgataattatatggattatccggctccatatatataaggcacattacttcatccataagttttttgatttttgtttcatcttggggaatatctactcttatactgtcatcatccagactgaaatactctgatgggaggttttcctcactaaatttgtcatatctgtcgtataaataacgatccgccattttcttgttaagggaatgggtgagctctatcatctatctcatctcctttacacaaacatctgtcactatatttggaattctgaatagcattcttgattctctcacggttaattctttggttcgcatatccaaaagtcattggcaacattcctgacacaactatttttgcaacaaagaaaccatactcataagacatctttgtagataaatcagcaaaatatatctttccgtgattatttaattttgtcttacagatgaaatcaagtaaatcctttgcgtcatcaatggaatcactaatcttatatgactctgacccatacaattcttcaacagtcttaacctcactctcaaagaggaagtcataattctttatatattcacgccttgaggcatgattaacatgatcaaacatctccacgacatcataatccgaattgtattctttctctccaattcgtggattagtttcatagattctgtgacccacaaggcactcatttactgctgcattaattgccacattataattcacatggctggcagtgctaatatatgttgccactttacctctaaaatccactgccaggcacagaatgctaggaatcgaaatgtcaaatgtcatatcgaaaatgtatactttcttgtcttccgtctcgaatctagctattttttcctgaacctttttttcaacagaattaatatcaattctgtataatcttgccttcttataccaaaagttcaaaaaggcatctctctcaaccagctcaaataatgcaaataactttgcctcgtaaattgaacttcctaatgcaacaccattagatgattcaaatacaaaataattctcatcgtctacatccatgctgaaaaattgtaatggtatatatgcacccttattacttccccactcttcaactttcaaccatttatatggaaaactactatcaaacttattgcctgcatttctgaattcctggctataatatagtaattcttcaggattcactaaattaagaccattattctcgtcatagctgactttttttatttccccctccacatcatatattgccagtctctcaataagttcaaggattgcactgtcctcggcttttttgaagcccttttcacgaccatatgaaaaattcaactcatccttgtaacgaaattcacatcccacaattgatatatcagatgaattcatgtctttataaatatttgtgataatgccgtacttttcatcaaaattctcttctttgaatctggtcagttccacactgtcactgattctcagattctctcctttgaacggaggattataattctgatattcctctgattccttatctattgcaggcaactcactgatattgatattgtatggctttgccgaataatccttatacataagctcgcaaaactcataatcatcaatttctttagaggctttacaataatcatcaattatttttcttgtcacgaaatcatcgttctcttcaacaatgtcatagctaaaatcaagctttattcttttgttagtataaaggcgttcacccaataccttcttagcacttttttcatcagaattctttatgaaaaagcatctgtcaaatgcatatatcatattaatccaccctaaaaatcaatactccttctttagaaaatattcccttatcatcaaaagcatatacacttttctctgaggcaaataatcttttgatttcatcgaatcccaaagctagtgataccttcactccatagctttggaataatttaattattgtttccgtaacactttcttttgcagcatcgagaagtaattcattctttccctctgcttctattacttctttgtcctttactcttgtaatcaccctgtttatgttgccatcattcttgaattcatactcaaaattcatgtcaataatgtcctttgacttaacaataaatctattaagtgcttctgcctctgtaacagattcatcgattcgaacatagtcttcttttactttcctaaatgcatctgccccaagcttaagtccatagaaactcttattcttaatctcaagagagctatttatacaataggtgttgaacatttttctataaccagatagtgaatccattaacatcaaaaccatatagtttgctgcaacagcacaaaaagcgtcactaaatctaactttcttctctgaacagcacataaattgatctaacatctgaattacttcagactttatctttgttgaataaatccaactttctttattagcattaaatgccatcacaatatagttgtcagcctcaatattggcaattgcttcttctattttgtccagatcatttctctggtcaaccactataatctgagtttttctggtaaccttattagacgaaaaatccccaaaatacatctgaattcgattctctaataatttagtcaactgttctgactcatgacctataactttaatctctatatcactatttgcaagactaatcatcatctgatcaaagtctatataattcttaatcagatatctcagtatttttgcatctgggtaggttacctcagagtaattcaaaacaccaatttgcattagaaatcttactatctttgactgcaacgtgtactcttctaaggtttcaacttcacgcaattctttaaagtatgacatgcatttaagcaattcctcatatgtaaagatttctttcttaatcctatactccttattatgaacacgaataaggcttgtactaccctcatctttcagaaaactgttatatctatacattagatattttttcatcatacctctcctctttaagcctcttttgtattaactaacaagtagcttgcctcaactctttttcttgaattaagccccattgccggcaaaagaagatacacaaaattaacaagcattctatatgcctgaaactcctttttcttgaagaaatccttgttggcattagaaaatgccgccttatgaaaggaacttaatgatctaaatcttctatgttgcatactaaggcttatgctaaatgctttgttggtattagtttcattttctgctgttaggagttcctgatacatatttgaatatagagattcccattctctacatatctctattatttcttctggaatctgttctggcacctctcctttaaagttgttctctataaatcccccaaatgatgacagggtttctgccatctcagtgaatttatcctggaacatctttttatactttcccatatccttgtgtctgtagctaaggaaccctaataagtgcgacttaaacgaaaggtatccatagcctattccagtcttgtccaactgcatggacgcactatagaacattccaaataaaagcttaagctgtatatcctcatccctgttatacaagaactttatcgccttctcgagaaccttctgccccttaatgaaatagtcggtgtatatttccttatcgattggatgattatactcaccatctcttttgattgcttcgattttttcacacttaatagtaagattttcaattggaatacatgctgaatagccgtttactctgcttatattcttctgattgtctaaataatatttattctcctgtacacttgcttcactaagatttgataaatatttatcaaaaatactttggattttggaatatatgtaagtaatcttaatgtctgaagtattcaggtataagtctataactggaataacatttacacttctggtaaaataataattatcttttacatgctcttccaaaaaaggaatcagctcattaactatgaaatctgttttagcttcacttgaaatattaatcccaatttgaatgtgatacattttcacacccctttacctttttacactataaattctgtcaaaaactcttccgagcctatattagtaggtattacctctgaaatattaatccatttactagttgcaactgtatttacaaataccttcagcaataccatattctctaagtcaatgtactgtggtttttcaaactctacagagacacttgttattctcaaactattgtattcctttttccttccctgaataaaaaacttagttggaatattattttcttttaaaaagctgtagatctgtgtaaattgagacacattatcattctgattcagtttaattaaatctgtgttaatgatccagtgttgtctctccaaaataatgttcaacattttgatgcgaggactcacattgactctatctacagaaagttggttaaaaaatatagccgatgcatctgaaacatggctgatatttgagaacaatgaagaataaaatgttattattcctggatataataccctcataagacttgtacaaataacaggcttgtaatcagttccatctttttgcaaaaggaactcattatcgtgatataccaaattggtatcgtatatattaattacttccttatagttctcatcaatcgcatgatttcttgtaagatcgaactccagcctatcatcaaaaataggataataagagttggcattaaatccaaaggtctcgtatatttctgctatgttttcaccctcgaccttataaaaatcttttatttcgtctctatatttctcaatgatatctgtgtatctcagaaatctattgtaaaagctcatataacctggatatattttgttaatgaccacatcatcacaatccatctcataaaaaatgctatatgcggctttttttttctttaattccgaaggaatctgatttatcaatgaatcaataaattcctcactgattacaacttcattcttttctgcactttttaataattcattaataaagctagttctaagttcatccagttttttgattatctcagactcacttgtaatttgcttccaaggatcaatccagaaattgctatatttcatgttcacatttgcgaccaactggaaaatataaggattgttgattggaatagagtcagttttcattttgcgctccagttccatcttaacttcctgctgaatccttgtattaacatcgaagattgtatatagctgcatcaactttgaaatgctatactgtgcactctccggcagattgtgaaccttatccttgaccacaatattgtctttgtatataaactctctgcttttaaaaccagcatcaagaccgcatttctcgcatgcgctcttttctatttcaataattcttttctccaaatccaggctgtactcttgatttatttctttaacaagcttctgaatctcaacaaaatccccacgaacacagcttgccaaatcatctttttccttagtgatttcgcctagcttatctacgaaatgctgaagcacatcaccttcatcggaaaaataagaatcaattctgaataatcctatctccaccagcttgcgtataaatacgcctgtctgttctttatctaactccagtaattccagaatatctttaaaataccaatcattcttgtcagcctgatttaaaatcggtgcaaaatatggattgttcttaacttttacattgcaatctcttgatttgaataatttgtggttttgagcattatctctctgtccaaaaatattaatctcgctatcgactatataaaaattcttattgagcttgaacttcacatcttcaatgtattcatctctcagtattatcctgtcatacatctggaaaagaaggacaaaattcaatgatatattattctttttgagttcatatctgattggattcatagtacctatgattccaaccttattaagccagcccattggacttgttttggtaaatgcatgagacactattcttgcaagcacaagctccaattttcttgtctcagtattattcctcaattcaccttcaagataccatttcatcttctcgtatattcggggattaacagttgatatagaattgtaaatatctgtatcatccataattgaattacgaagaatatttcttgaatttaaataatcattttcaatcgcatcagaaaaatcatttttcttcccaagcaactgttggcaacgattctcaaactgctcaagcatagtgtttatttcatcaaaatcagtgacataggaagtgtaattgtattcgaggttaagcttcttaaggcaatcaagaacctttcttctcttgctattacgaacaagaatcttattgctgatctcaaaatatatctcagccgcaaaattccttaactcctcttcctccgctataatatcttccaacatttctgctttttttctataatttgttgtaataaaatcattattctgcagtttttctctgcaaactgttagaggatgtattttcatcttattttttcttcttccatttaattccaacaaaaattcccgctacaataatcaagcctactaagaatgccattgaaaaccaaaagcccttaacatcgctgctatatcgctcgatatcccatgctactctaagaacatttgtcatgtgataaagcggattgatcatagctaccttctggaatgatcctggcatcatacttaaaggaatagtagtatcgctcagaatgaacattggcataaagaaagccatcattgctgctgaatatgtattgagcttatctattaaaatacctgctccaaatccaagacacagtgagtaaacaatagtaaccacatatgacacgcagtaaattactggattaggaagagttacattgaatctgaatactgctaaaagtaaaataataacaaatcccaaaagagcaagtaaaaagcccttaaatacaactacacccatgattctgccaagactgattggagttgctgataaacgcttataaattcctttttccttgtcacctacaacctgattaccaacgttatatactgacgaagcaaaaagaataattacagaaaatccaggaatgtagtttgcaaaaaaactgaatccgttataatctacatttccgtacatcattccgaaaaacaagaaactgaaaacaggcataagtaaactaaacaacaaatataaaggctgtctaagatacacttttatttccacctttaactgctcaatcaacatcgccatcatctttacctcctgaaattcttaaatatatttctgacagatccttactttcttgctgctcaaagaatttgtctaatgctccagcatacaaaagttcaccatccttaagatatactatcttatcacaatacttctgtacctcttccatgtagtgagatgacaagaacagaagagtgtcattacaaagctctttaagtactgtccagaaatcatgtctggctcttggatcaagacctgttgtaggctcgtcaagaaatacaacctttggcttattaataaatgctaaagccaggttgactttttgcttcattccacctgacagcttgtcatagtatttattttgataatctgttatcttcagcttatccatcaaataatttatctcaaaagtatccttgtagtagctcttaaaaagacgcagaagctctataaccttcatattgctataaaaagcattagactgaagaataactccaatattctctttcatgtcttttaattcaaactcatttgaataatcaacggttccacttgttgcagtctgaatacccatcaatatctctaacatggtagtcttaccactgccgttatgcccaattactcctacaaaagaaggtgcctcaaattcaaaggatatgccctttaaagcttcaacatccttaaaatctttttttagattattaactctcattttttcctttcccaacaatacctttctgtaaaataggaaccctctgcaagaaggtccctatctatttgtctcaacatcctatgaaagtgcatttaattaccttttattatttactatattacctaatccctactaattatgcataaatatactatgcaccaaaatgtatgctacaacatgaagttgataaacaacatgaacaactattgcatgagctgattcctgaagaagcagctgtctctgataaagttgttgtctcgtcaagctcaacgatttcaattccctcaaaaacatcgtctaatactttcttgtcttccataagtgccctcctagttatttatatttttcacagaatgttgtttaaattttatttgagtttcctttttttgtcaataaaatttattcattttgcacaaatttattttaataaaagtcgcttgtatactacttttttcctatatattacagttctgttgtggtgcaaattttaatagtcgaatttgcgcatatttattttgtgtttcctacagaatctctggattcaatctgaaaaagataaaatccatgtcatttaatttttcttatgagtcttgtaaacaatatattttttgatataattattttgggaagtagaaacaattgaaatgtttaaggtagaaaggaaaatttttcatattatgaatcaagacatgtataatcgttcctccgagtcaacaaaagaatgcataaatactcattatcaaacgcgcgatactgtattttctatcatcgtatcagttgcatttattttaataattacgtttttgtcgtactttgataacggtacagaatctgatttttctcaaattattaaagtaataaattggcgtgaaattgcccctctttttattctttctttgacaattggtttaattaattatattgtcagactaatcaaaaaaagttgttgcaaaacaactactttatgtactgttgttgcaaatgttcttcagattatctttgcttatattattacaaagcaacttaatttctggaattttgattatatgaatagcacatcgcctaatgttaatcctaatattcagaccttttattgttctctatttaaaataagtactgttgtagaaaatattttattgtgcgttattattggaattaatattgctgaaattatcactgctttctttaaacaatacagtaataaacagcattaaatatttacacgagtaccaatctgatttatcctgtaaggtaagcgatgaataacataccgcccactatatctccaaatgtagtcaagcagtaacggacttctatttattttatgttcttttacctctttttacagtagtcgtattctgttttccgggacattggatttgacatcaatgattcctgaacacagctcttttataaaccactccatagtatcagctgttctatacctgcggacgaattcatataattcggtatatacaggagtaccgtatagagatactacagaatattcaggctgtttgcctttgctgttccaaaaccgctctctgttgctttcgttcttctggttccttctcttttaatgaactctctagatagaagaacttattgcaatactgccgaccgatttctgcccgaagcagttcttttgccttctctttatcaggaaaaatgttacatttatacatatctcccctgtctcagcttttcttatcagtcatatggaaacgacagcctcaatttacatataatgtttcagacaaataaaaaggacgcataatctatcccacgccctcactactatctggctttatcttcccttaccttcgatacttccttatgtgccgcttcctgcttcacctcatccacacctctagcctcaaatgcatctgcattatactgatactcctgcggctcagcgaccattggagagtatacaatctctgcttccactcgctcagcttctgccctctccggttccgtctgttcctgcaccttagcattctccatatgcttttccttatccattctcacatctatcgctagattatccagcttatcaatagatgcatccaaatgaagtttcattgatacaagcatctttttcactgctttcatcggagcaagtactgcctttgtaattggatgtttctgctctttctgagaataatctacctccggtttgtcagcaaaagtacggaatgcattagctgctgtctgcccggcttcacgaaattcttttgcaagaagtgctgtctttgctatatccttatccgtagtcttgattgcacctcttacattctctcggatatcaagaagtcttttcttaattcctaagaactccgacaccctgtataatgcagctcttcccttttcctttgctttttcgactatgcccttagcagtagacctgacctgttctttcacttccaatacctgcgactttatatgctcacatctgctattaagtcgctcctgtgcttccgacaatgcctttttagcattattgacaagtgtatcctcctgcatttctttgatctggttctgcatgttggtaagttcttccgtcatggaatcaatctttttctccagtccatccacatagctgcatatctcaaatacatcgtttgcctgctctttcatggcattcttctttaacaattcgagaagttcccttacaacctcctcattggtaagtgtttttcctgcttccatatccattctgtttcctccattctgtaaatggggcagccttggccgcccctgtaacatgattactaattatcgaaagggcgttgcctctttgtccttctctttatcgggattgccatgatgtttctcggcactctccctcgccttttcgttgctcttatcctttgctttctcatattcagagataatctcattatagagtttttccctgaaatcctttgtgaccggatagcagacatcctgatagattggcttgccctgctcgtccacctgctttgtcttataagaaggcattgatacaaagattttctctttgccctgcacgatattgatgttatttacgatgaaactgttttcaaagtaaatacgggcaagtcctttgatgttactgccttccctctcataaggtgccacagttacggaaaactcaggcatttcacgtgttctgtcctgcttctgtgtctcctctttctctggttccttgattcttgcataggcatcaaggatattggtatagagttcctcacgaaactctgctgtgataggattgcacacatccttataaatcacaccattgctttcatcacgctcattggagcggtatctaggcattgaaacaaaaagctctcccttgtccttattctcaaggattgcaatattggtaatcttaaatgaatcaccaaatactactgttgcaaatcccttgatgttgctgccctcttttgcccttacttcgtttactttaattgaatacttcatatgctattcctcgctttctttttgttctttgttttgctccggtatgataagctcacaccaaagctgttctatctgttcacaagacaatctgccattaagccagttgccaagtgtaacgaccattccgtcctgctcgtaatagagccactcctgtgtttcaatgttcccctcatacacgatagtcacatcaaaatcaggcataaataatccttcctctgcatcccatacacaggctattccctgtctgagtgtcagattcaggctttcgacatacacagaccagccgcttacaactatctgaaagtcatcatcaatctctgcaatatcatcctcaagcccgattagctcttccatttccgatactgcctcttctatctcacctaaccggtatctcttattcatccatcaccgcctccttataaatgcacctgactacaaaacgcatggttcctttccgggaacaggtaaaaagagttaattctttttctgcaccctgtgtcttgatgctgttatcatacggatttactacctctgtctctgttacctcatagatatgcttcagcccctttttgtcggttatcatcacctcatcacctatggatatctgatttagtggtgtaaaaaatgtgccatatctgctgccattgtgaccgcacaatacgcagttgccactctcaccgattcctgctgtttcttctatatgaccaatcccggcattaagtactttacttatggttccttccattaccggatacctgatatctaagcccggtatctcaatgatgccgataacaccgccttctttaagaatggcttcatcctctttactaatggaggtttgctcttcctccacatctgtttcttcatcgtaatcatcctccaatgtctgctcaaattcacttatgagctgttctgtctgtttttctccggttgcccgccagaaaaaagggactgccataatggcaatccctgctgtaatcagtagtcctgcgaccacttttcttatactcatcttactcactctcctatcgtgttctgccctctctgtccgctggataagcacctttatcctctgctacaattgctgcagattccattctgtcatcagcttctctttcttcctccggtccgctcaggtctgcatccacagcctttgcgttctcaaggtcaagctgggcattcagttcacactgccttgccagcttttcttccagttccttgctgtacgcaaatggcttgtcatactcagtctttgatgcttcaaggtcattctggtactgctcaatcttcttttccaggaaatcaatgttctcatggagtccgttgaacaggttttccagcttcaccatactgccgacaggacttgtggaaagctctgccttgtactcggtccttccacgaagcaccatataattgatgccaaggaagttcttttccacaagcagctcaaatccgtggaatttaccgattgcagttgtctctccggtcttgcatttgctgattgcttcaagcatcatcgttccaccatccacacgctcagtataggttgctttgcctatggtaatggcaaattccggattatcaatcagctctttatcccttgcctttacatcctctcttacattggcaagcttttcggttgctgtcttaatgagcttcgggtacttgatcataaagttatcctgcaagccatatctctgattatcataggatgcctttaagagctttaatctctggacatcattgtcaatctccatcttttccttgatcaaaggattacctgtagcaaccgccttgatctctgcatatgaaagtgtagcctcgtcgatatcctcgcagcttcggcttacagccttgcttgtcataacctgactgataaaacgctgcttattctcgacgagtgaccaattgtatgcatcaaaggttcctttggtgacatatctgtagattgccacctcttcattttcgttgccttgtcgtatgcctcgtccttccctctgttcaatggatgtaggacggattttgcggacattcaaaataaaaaagaatgtggaggtaacagacaatggcaaagacaatttttgaggaaatgggcggcaaatatcaaaggcaaggcgattacttaataccgtgtttgactgtacccgccgaagaagaacagccgataggcatctggggacagcggcatttggattatctgaagcatcactgtaaagttacatacaccaatcttcttacaagcggcagacttaacgcttaccttgccgacattgacagacaggcacaggaacgctttgaaaggctcatagagggtatgaaacaggcacagggcataacggaacagctaaaggcagaaaacgccttagaatggacaggatgcctcaataacataagggcttgtgcgagggagattgtggaaaaggaaattatttttgcataaacagatgattagtggcagggggaaatcctgccgctttttctgctttagtttgtcagcttgacaaataaagggttaaggaatataattagattcagtattatacaaggagttaataaatatgcggcaaggtattcttaaataaactgtcaatttgatagtgggaacaaaaagtagcagtcccgtttcacttttaatatggggcttagttttttgtacccagtttaagaatacttttatcatgtaattttatatgcccgaaaacatataagtgttttggggctattggagttatttacccagtgataggagtatttatcactgggtatttttatgcccttttttgggtgttgataggaggaaaatcacatgaaaataattaacttaggcattctggctcacgttgacgcaggaaagacaacattaacggaaagtttattgtataccagtggtgcaattgcagaactagggagcgtagatgaaggcacaacaaggacagataccatgaatttggagcgtcaaaggggaatcactatccagacagcagtgacatcttttcagtgggaggatgtaaaagtcaacattatagatacgccaggccatatggattttttggcggaagtataccgttctttatccgtattagacggagcagtattattagtttctgcaaaggatggcatacaggcacagacccgtatactgtttcatgcactacagacaatgaagattccgacaatttttttcatcaataaaattgaccaagaggggattgatttgccaatggtatatcgggaaatgaaagcaaagctttcttcggaaattatagtgaagcaaaaggttgggcagcatccccatataaatgtaacggacaatgacgatatggaacagtgggatgcggtaattatgggaaacgatgaactattagagaaatatatgtcagggaaaccgtttaaaatgtcagaactggaacaggaagaaaacaggagattccaaaacggaacgttatttcccgtttatcacggaagcgctaaaaacaatctggggattcggcagcttatagaagtgattgccagtaaattttattcatcaacgcctgaaggtcaatctgaactatgcgggcaggtttttaagattgaatattcagagaaaaggcggcgttttgtttatgtgcgtatatatagcggaacattgcatttgagggatgttattagaatatctgaaaaagagaaaataaaaatcacagagatgtgtgttccgacaaacggtgaattatattcatccgatacagcctgctctggtgatattgtaattttaccaaatgatgttttgcagctaaacagtattttggggaacggaatgctgttgccgcagagaaaatttattgaaaatcctctccctatgctccaaacaacgattgcagtaaagaaatctgaacagcgggaaatattgcttggggcacttacagaaatttcagatggcgaccctcttttaaaatattatgtggatactacaacgcatgagattatactttcttttttggggaatgtgcagatggaagtcatttgtgccatccttgaggaaaaatatcatgtggaggcagaaataaaagagcctactgttatatatatggaaagaccgcttagaaaagcagaatataccatccacatagaagtcccgccaaatcctttctgggcttctgtcgggttgtccatagagccgctccctattggaagcggagtgcagtatgaaagcagagtttcacttggatatttaaatcaatcgttccaaaatgcggttatggagggggttctttatggctgcgagcaggggctgtatggatggaaagtgacagactgtaaaatctgttttgaatatggattgtattatagtcctgtaagtacccccgcagactttcggctgctttcccctatcgtattggagcaggctttaaaaaaagcagggacagaactattagagccatatctccactttgaaatttatgcaccgcaggaatatctctcacgggcgtatcatgatgctccaaggtattgtgcagatattgtaagtactcagataaagaatgacgaggtcattctgaaaggagaaatccctgctagatgtattcaagaatacaggaacgatttaacttatttcacaaatgggcagggagtctgcttgacagagttaaaaggataccagccagctattggtaaatttatttgccaaccccgccgcccgaatagccgtatagataaggttcggcatatgttccacaagttagcttaacagcttgcaaaagtcatataaaatgagatttgaaaggattagagactaattatgatgaaatgcgaatggatattgtgtcctgtttgtgggagcaaaacccgtaataaaattaggaaggacactgttttggagaattatcccctttattgtccaaaatgcagacaagaaagattgattaaagttgacaacttgaagataactgtcatcaaagagccagacgcttaagacgcagagccgatgaaattgtggaacaattcacgaatcatcggctctttttgtttcgtatttgaaagaacaaactcaccaaataaaaaaaacgatattcgggtgggttattttgttataccctaaattaccctctgaatttgtttttaaatttggagggatttttttatgtccttttttcgggcagttatctatctgctcatacgaagcaaaatttatcaatacatagcatatcagagaacggcaggaaaccagttaaaaaaatttctgcctatgcaacggtacttcctgccttgaaagtagaagtacaatctccatacaatagaattactatttcctataaccgtaaaggtcacagagcctttgcggtttttcttttgtcgatttttgttggaaagtgccgtagggctgtttctgatatgcggtgtcgttctccgcctctccatctggattttttacatttcaaaaattcagatgggaggtatttatggtgaaatatgcaccaagaaaggtatttatcaaagaaagcggcagatatgtggaactgtcctacatggatttctgccgccgcagggaatccgaccagacctacatggacaagctgtttattcccgttcaaggctgtctgcttgaagtcgtgagggagcaatacacggacttctaccgagataaggaacggtggcgttatctgaaaaaattagatacgaagaacagcttgctttctctggatggatttacggacagcgaggggaagcctttagactttatcgctgatgaagcggcggacattgcggaaaccgttgtcaatgcggttatggtggacaggctgaaagccgccctgcctttgctgtcggatagtgaacaggaattgatacaggcaatcttttttgacggactttctgagcgtgaagtcggggcgaggttcggcataacccagagcgttgtgaacaaacgcaaagccagaatcctaagaaaactaagaaagataatagaaaattaaaatttaaggcgttcagcccccttgttttttcctttgggaaaatgagggggtttttctctgccctctcaatcaattctgattggaggaaaagaagcatggcatataaccacggacgggaggacaggaaatggcgtatctggaaagaagcggaggaaaagctgctgcgtgagtgcggcgttgatgaagcgaccattgagcagatacgcattgcggacagggcagacttcaattccaacaggcggttttaccgatggacgaatgacgttgcggaataccttgaggacatggcagacagggagtggcagacggaagtgggtacggttgcggagttactggacgagattgagagcgaaaatctctatcaagtattagtcgcggtggacgggcgtaccttgaaaatcgtcctgctgaaaatgcaggggtattccacaaaggagattgccccgcttgtgcatttgacgactggtgccatctatgcgaggttagaccatctgcggaagaagctgcggaaaattttgtaagcgtctaatacatcccattatcctgcgggctactgggtggggagtggaatctccccgcttattttttggcaggaggacagcgggatggcatacagggttaaggcatacacgcttcgggaggaatccacggaaagtagcacaaggtattttatcagttttaaggacgggcagggcaaatcccacgagttggaagtgtcggaacagttctttatggagtttcggcagatggaacgcaggaacaggaatcttctccaatgggacgagcggcacagggagtttaacgaggtatgggacgaaaccctttacagacgggcgttgcgtgtgcctaagagccttgatgaacgcatgattgaagaagaacggaatgaaacgctctgtaaggcggttgagagcctgccagagatacaaaggcggcgtttcctgctttattacgagcatgatttcaatttttaccaaatcgctgcgatggagcattgcaccgcttcagcaatacagaaatctgttgcgattgcaaaggagaaagtaaaggcggaaatgaggaaatatctccaaccgtgactgataccgcccgaaaaagaaatctgttttttatttgtgtgggattggcggcattacatactctcactttttttcgtgggagtaaatctatttctaaggaggtcaacgcctatgtgtaacgaaaacaaagacaccgcccgaaaggaggaaagccatgcagaagttacagacagtcaacgccgaaacgctcctttatgaaccgcttgagaagcagtcctttgtggtggacagccttatccccacaggattgtcgctgttctgcggctcacagaagataggcaagagctggctcatgctgaagctatgcctatgcgtgtcgcagggacttcccttgtgggatatgccgacaatggagggcgacgtgctttacctctgccttgaggacacgttctgccgcatacaggacagattattccgcttgacggacgaagcaagcgggcggcttcactttgccgtggcaagctgcaagctgtcagacggtcttatcgtgcagcttgaggattatctgaaagattacccagacagcaggctcattgtgattgataccttgcagaaagtccgtacagcttcaaaagacaatgcctacgcaagcgactatggggacatctccctcatcaaagactttgccgacaggcactctctggcggtcattgtcgtacaccacatccgaaagcagaatgacagcgacgtgttcaacaaggtgtctgggacgacaggattaacggggagtgcggacgctacctttgttctggaaaaggagaaacgtgcgtctgacaccgccaagctgtatgtgacgggcagggacacgccttatcaggaatacacgctgcgtttccgtgattgccgttgggagcttgtggagcggaaaacgcaggagcagcttgcgaaagaaacgataccagatgtcctttttcggttggtggattttatgagggataaggaagaatggataggcacggcaacggaactgttagccgctatgggggaaacggaaaccatacccacggtgattacgaaatggctgaatgaataccgcaccacatttttaagcgagaaccgtatctgctaccagtacagccgcaggaaagacggcaggcggattgcccttgcaaggagggcgggtgacagcggtgacggtggtgacagcgatattaggatacccccctgttactgtcattgacgcttaaagccatgtaaagctggcggctctgccctgcgggtgacagcagtgacggtggtgacagtgattttaggataccctgccgctgtcatccctacgggagaacaccccgtaaacgcaaaatgcaggcgtgagatttactcgcccttttcggtcgtgtaaaaccacccctgcggtcagaaaaatcattccgatttttccgactgcgtttacagggtgtaacacactacactttgccctgcaaagtcgtgtgccagacgttccctctggactcccttaaggcagggctgtgccctgctatcctacgccttacggcttcggataaaagaatggcggcatgacggtgacggctcttgcgagggggggggtatcccaaaaacaccgtcatcatcgacatgaccgtcatgcagggggtgagggtgacagttgcggcagtcggcagggggtatcccaaaactgctgtcaccaccgtcaccgctgtcaccccaaaggacggtcacccgccgaaagaaaggaggaatccgcctatgccttatgcaatcctgcgtttccagaaacgaaaagcgggcggcgttgcggcttgtgaacgccacaacgagcggaagaaagaagcctacaaaagcaacccagatatagatatggaacgctctaaaaacaattaccatctcatagcaccaccaaagtacacctacaagaaagagattaaccgcatggtagccgaagcggggtgcaggacaaggaaagacagcgtgatgatggtggaaacgctcatcacagcttcaccagaatttatgaaccagttactgcccgaagaacaaaaagcgtatttccagacggctcttgacttcatttcggagcgtgttggaaagcagaatatcctctccgctgtcgtccatatggacgagagaacgccccatatgcacctctgctttgtgccgattacgccagacaataagctgtcagcgaaagctatcttaggcaaccagaaatcattatccgagtggcagaccgcctaccatgagcggatgtcctcacggtggaatcagcttgaacgggggcagtcctcaatggaaaccaagcggaaacacgtccccacatggctctataaattaggcggtaggcttgataaacagtatgaagaaatcgtgtctgccctatccgacatcaacgcctttaacgcagggaagaaaagggataaagcgttagatttactctctgcatggctgccagacgtggagaaattctctaaggaaatcgggaaacagcaggcgtatatcgacagtttgaaagagagaattgggcaggaatcagactatgcggggcgtatgcgtgatgaaaagtacgagcaggaactaaaggtgcagaaagcgaatcagaagatatttgaattgcagagaaccaacgagcagatggggcggctgctgtcaaaaataccgcccgaagtgttggaagaattgcagaaaaatcatagaagcagagcgaaagaaaggtagatatgtgaatgaagaaacaggattttaaggtgttaaagaccaaagacttgtacccgttccccgacaatccgtttcatgtggcagaagatgaaacactgtcagagttagcggaaagcatcaaggaatttggcattgtcacgccgataatcacacgcccgaaagaggacgggaacggctatgaagtgattgcgggacagcggcgtgtccgtgcttctgaacttgcagggataaataccgtgcctgcgtttgtcctgcccttagaccgtgaccgagccatcatcacccttgtagacagcaatttgcagcgtgagaatatcctgccatcggagcgggcgtttgcttacaagatgaaatccgaagccatgaagcggcagggtttccgcacggacttaacctcgtcacaagttgtgacgaagttgcggacggacgacaaggtggcacagggcttcggcgtgggcaggatgaccgtgcagcgttttattcgcctgacggaactgataccgccgattttgcagatggtggacgaggggaaaatcgccctcacgcctgcggtggaactgtccttcttgaagaaagacgagcaggaaaacctctttgccacgatggagagcgaagaagcaacgccctcactctcacaggcacagcggatgaaaagcctaagccagagtgggcggcttgacatggatatgatatttgcgattatgacggaggaaaagggaaatcagaaagaaaccttgaaaatcaacacaagcaagctgtgatttcaaataagctgtaaactctgcacctgcaagcagtcctgcttcagtatcatcgccattatccgataccttgataagctgaaatggctgctttataacctgctctgctgaggttgtgcttcttgatacctctgctacaagatctccctcatagtcgcatactacatcatgctcctcttcatctaaaagatatccttctgatggtgtgatttctttcacataatagtttccaaggtaaaggttattgacctcagcttcgccattcttatctgttgtaagtgttgccacaaggtctccggcagtgaacataacacctgttgctccgtctgggtggttgattgtttcccttgcataaagaccataaactgcaccggaaaggcttgcatctccctgggcaactgccttgcctgattccttgtctaccttgtaaatatgaatctttgctgtagttctgtcatttgcaaatgtgtgactgaacgatgcctttgcctgtgtttcaggtaatacattgaaattgaagctgtaaacatctttactgtttctgatatacgcatatggagcctgtgtctctgagataaaatatccgttagagattggcagatccacgctgtagcttgcctttccgtcctctcctgtagttacggtctcaagagctgtaccctttgtcacaataacctgtccggcatagtttttgatgtcatttccggcataaagtgtgtacttgccgccatcaagagggttctctgtgtcagagtccttctttacgacagatacatccgctttctgtcttgtattctcaatcgtagttgattcatactgtactgtcacagtttggtccttatactcaactgctactgtctgaggtgtggtattgattgtatacccgtcaatgctcttaatctcagttaccacataagttccaagatgaaggtcagataataccacctgtccgtcagttcctgttgtaaggctttctgccacaacatcgccagcactatacacctttgtaccatctgccttgtagatatctgctccggcagttaccttaaaggttgctccggaaagcttctttttctcataagtgaaattgcttccattccatgagctaagcacttcaccctctttatagattgtgattgctccaagctgctctttatctgttgcagagattcctgttgtctgtcctgcttttacagtaagtgtatgaaccttaccggaaaggacatatccctttggtgcagtaatctcttttacataataagtgcctgcaacaagtgcagctgactttgcatatccgtttccatctgttgtcatggtctgtactctgtttgtgcatccgctgtcagaatagattccatagactgcaccggaaagcttcactccgcttgactcatctgtctttgtaagctcaccatatccgatgttctctgtcttgaccttgatataagctttaataggatctgctgtcggtctttcagaaataaactcctgatatccgctctttcctgtaagccagaatacacagcttgatgttgtctcaaccttgccagcattggatgtgaatgttcctgttgtagctgtggtattcacgctcgttgaagagattgtaatactgttgccattcttatcaacagaatatccgctgatgccaaaatcaaaatcagataagacaccattgctgtcagataatgttgcttcaaatctctgacttccctcattccacttcaactcataagttggtgcttcactggttctgcgtgatgcaaaacttggaagcgttgcattgtaggaactgctgatattgtctctgagtctctcataatagctgtatgaagaatcaggacttggtgctgtgttacagagctttcttgctgctgaatcaccgcttccggttccaaagatatctgctacaataacccataccattgcctgagttgcgatatactcatcgcactggctgttgcttggtgccgccttttgtgtactgttaaatccataataaaggcagtaacttaaaagctttctctgctgtgctgacattgatgtgctcgcatcatcgtagctgttcataagctgaccgccatctgctcttaatccgaaattcatacaatatgccgaattgccgtcaagaattgaatacagaatcttgccatgattaaatccgggctttaactcacttacttctccggaatttttgactgatgcattccagaacgcaatatttgcctgcggactggctgcaaatgctgttgtaccattcgtaaagagtgttccaaccagtgtgagcatagccataaatcctgccataaaacgctttagtttctgtttcatgtgctctttcctccttaatttacgcataaaaaaagaaagacataagtttatggcttacatctttcttccttctgcttctattcgtttttatttatctgtgacatcgaaactcgtaatagtctgtgccgcctgtcgtgtaaactccatcataactgatgtagaataccgaatcagtttccaaaagtaacatacttgcaatatattctgcgattgcatcctctgatgataaccgctgtccatcaatggtacttgttttgttgagatctgtctctacaaacacactgtaataagagccttccataccatcgtaaggataatactcattgtactcttcctgcgtgatactgccatcattcaaatggttctgtaaattctgctgtgtggtaatcatccctcctgcctgacactttgctgttgcaagtgacacaacattttgtggactgtatgccacggatgcaggctgtgaattgctcacattgtctttcggactgtctgtagtctgaccaccattacctgcattactctgatttccaccagcttccttattaccacttgcaggagctttctgttccggcttgtcattctgctctgacttttcttcctgctttgatgcagtttcattatcagcggaccggttatcttccttatcagtcttctcttctgaatctttaacctcggcaatatctttctctgtctcttcacttccagcttcggttgtgacctctgtgacaacttccgttgccattgctacttcttcagttggctttacgctttccgtctgtttctctgtctgattatcagccttttccttaccaccattacaggcagccattgaaaagaccagtactgcggataataagataatacttatcttcttcatagtaatcacccatcccttctccgcaagaggaacgggctttgtgttccgtgccatccacccttgcggtgaactatttatctgtaatgcacgggacacataggactgtcccgtattctgtgcatcttaaactcctttcattataccagctctcttattttaaagaaatactgcataagtcgtctgtttttcttataattcaagaataaaccctttacctgcatatgctcacctcctctcagaatgtgcccattcttacgaatgaaagaaatatccttgccaccatagcgaatagaagaagaattattctggcaagtcctaagaccagcttcaacgctccaagaattatccttaatatccacttgagtatctctaaaatcactgttcctacggctcccataactcttctcataataatcagtctcctttcgacatccatcccattgcaagtcctgcaacatctgcatcgtccataacatcttctgtaggttcttgtgcttcactattggctgcctgcattattaccggctgaccaacattcatcccggatatcactccgcctaacagctttatgacctctttccttgcttcattgattgctgcttctataacctctgttttaatgtcctcaatatctgctgaccggatatattcagccctttcattatcttttttctttgcaataaaagtctcacttccataattatcaatgtaaaacttacatgcatccagtataaactggttcttggacttaaaaatcttcggatcaagattctgaatgacattattaattagcacatggtctggattatgcatatttagtctaattgttgtttttacttcataatcaaactgttttgccatcatgccacctcctaagataatctccttgcacttttaagtcccatcatggcaagctgctcatatcctcttgcatttgcctttacatcaaggttataggaaatattcttggcgtcgtgactaccaaaattcttcatcacaactgccccgcctccgacaaatacaatcggtgtagtctttaagttatacccaaactcacggattgagttatataccttatcaacaaaatcctctatctctgccttgataatggcaaagtattcatcatcaatatctgacctgccatatagcatgatgttctgtatctctgactcgtctacctctccgttaagctgtcttacacactgctcattgatagaacgcatacaggtaataagaccttttggaatcgtcacacactttgattcatccggtgacttgttgattaccggcataatgtcgattgtccagcttccaatatcaacaatcaatgtcttctttgccattgtaggaatcttgtccactactgctgcataacactgaggaaatattgccacatcatcaatttcaatatgatatgactcattctcatatttgaagcttacacgcttattctttgtcaggtacttaataaaatcattcttctctgctccaaaccttgtaagcggaagtcctacggcaaggaatacctttgcctccgcaatacctcttcttttaagttccttagcaactgctgcaagagtgagaagataaaagctatcatcttcgaccttggtatcctttacttcctgcctcacagttccaaccttatagaactttccttcatactcaagtacatcaccgaaaagtgccggagttgttgtaatctccttaacacctgtgacaaatacctgagagattgttttcatcattgaccagccatgatcaatgccgattacttctaacttgttattcatatgttttgcacatcctttcttcttaaacagccacttgaacatcttaaccacctactttcctatcagctttcgcatacaaggaaaacaataaccattcccttgataatatggacatccgacacattccgtcggaagtttctgttcttttttcttagatggtttacaacatgttccattggcacatctgttgttatgtccccagaagaatctacaatgcatacaatcttttaattctctttcaagcttttcttctggagatacaaacctgcgtttcttatgcttatctcttttttcaactgttcccaccagagctctcctcccttccaaggagtgattgctctcttatctgttccattgtcctgtccgactctcctgccgtcctagctaacgaatacaatacgataagaacaataattattaatgctatgctaaatcccatcaccactttatcctccttcaaattagttgccatatagacaaaatttgaatttggaagtgatatagtctacatggctatgcttaatgctaagcatgtaggtacacgccagtcttctagactcctatatcgccccgtgtacaaagaggtgttctcacctccgggagttacagacgagccacaaaatgtgtttcacgacgcccttctgaattatcagaagcactatctcctcttttagccttttgaggataaggacaaacttctcgccctctgtggttgattatccttacgcaacatgccgaatcctttttccagatttccatccagcttctcacccttcatctttcgatccatcaggctactaatatgatagctgtgactttcatcttccaggtacatgccccgtaaatttactacctacagatactctgcagtgcaaactactttgcaaatctgtaactgattattaaattgttcatcccaagtttttcttggaatgtccatatattacattagtttctataatgccgaaagtgacaatcacgggtcttttttatcaaaacaggtactattgtggtcttttttatcttcgcttgacaatttattccaaatatgtttgggcaatggtcttgttggttccttaaatttctccaaatacatttcaaaaatatctgtattaatcaatgctgaatttccaaccttatatactgcccctgcttctgaagccaaaaccataatccttgatttacttatgccataaataatggctccctcagtagcatttacatattttttcataatgtcttttgtatctgaatagaacttatatgagttactcattcaattcaccttcttcctgtccgtataacggctctttcaaaggtcttacaggttgtctgaattgctccatgtaattatcaaatatttccaaattaactagtacagtccctcctgtcccctcatttattttatatgtagcacctgctgctctagccaactcgataaacctatgccttcctatactgtatataattgaagcttctccaattctcgcaaactttttgattatctgcttatttgttccaggcactttatatatgtgtttcataaactcatcaaacctttccttttttaccaaatgaatacgggtaagcttgtataaagaacctgcagccttagctatatattcagtttcctcaacactaaatccatattcatgagccacctcttcgacccttatgtatctttttattacctccccaccatgaagataagccctaacatccggctgtaattgtgttaccatccttttcacctacttataaaattcatcatcaactatatggaatgtctcaatgtactcatcaaatatttttaaattcacaagtactaactgtcctaacttatagattgctttggcattcttagccatttgcataaactttgatacgctcatatgatacatttctgcaccttcgctatatcttacaaactttgtattaccattcttcttaaattcctgatatgcctttgtgtgttccatgctattctcctttcggtatttcaattgttcctataacgcaaaaagaggacatcttctaaatttctttagaaaatgtcctctaagtaatacaatctttaatttttcagactaagcaatctgtactaacctgtactaatctttttttgactatgccaaaaattggtcaaatcttggtcaaaaccccttgaccaactatataatttagtacatccaagtgctgaaacccttgattttcctgcattcttacttatcaatagacttcatcgtcgggaatttttttgatttttcttcattacccttcgtgatgcttcgctgtgctatttctattaaattgtcttctcttcatcaccattcatgatgaatcattgtcaaatcatatctgttgtcaatttgatgtcatttggttatttctgttgtcagatgaaagggttcataagcccttcttaaaatacatccattgttgcagccaaatgttcaaatgtttcctgttttttctcctctgtcgcttctgcatagatatccatagtggtctgaatatccttatgccccatgatcgactggattattttcaggtttgtttctctttcacaaagccttgtgcaaaatgtgtgtctcaagctgtgcgctgaaaaatccggcaacagcaccggctcccgatgctctttttttgcctctatttcttctgttgcgttataagcagatgagattctcttgattgctcgattgactgactgggcattcattatatttccataacggttacagaaaacaaagcctgtcattccgtcaatctctgcatctgtccagccattttctttctgctcttcccagatcatttcaaaagcatctttcactgtatccaacatgggaatcgtacgcattccggcttctgttttcggcgtcgaaatgtgattttccgatgcccggtcttctcctaccggataatacgtcagattatgattgatgctgataatccgcttctcgtaatcaatgtcttcccatcgaagccctaaaacttctccaatccggcacccggttccaagaaaaatcgtaaaaatcggccaccagtgaaaataaatcggatgcgcagcaatatattccataaatgctctctgctgtggaattgtcagtgcatgtctcacaccggtcttcatgcctaagtttttctttaattctgccatgactccatccgtaggattttttctgataatgtcatcccttacagccagttgaaaagttggatgcaataacgtatgaatggtttccaatgtgttaatcttcagttcctgcttcttggtcaaatgattatagaactgcaccacatcagaatacttaatctctgctatattccgctttccaaatgtatcccggataaatcggtcatacatataaagataattactcttggtcgttggtttcagattgtttttgagactcatgtagcggtcaaatacaaaatttactgtagcctttccggcaacataaatatccagaccgtccatctggtctttcatgagctgtgcttctttttctcgaagcgttacaaggtcttgtgcataaacatacttacgtcttccaaggggatctgtataagtatatacatacctctcatcggaacgtctctgtgattcacctttccgcaagactctgcctcgcagatcttttcttgtctgtgccatataaaatcctccttcaataaaggaaggacttcatgttattcaggtctgttcaaaattctttccagtccctgcaggacaacttctgtcacagtcattttgtgctttccggcataatcgcagatacgcttatacatagaatcttccacccggatactcaatactttcttttttacattttccgactttggtcttcctgtcttcgccatatctgttcttattcctccacatcttcattatagttttcgtatgacaaaaagtcaatccctgtttttcgtccttccacaattttttcttccctacgcaatccggaatgtctccagatacttttcaaatatctcacagtttacaagggcaaccttgtcaatcttatacactgctttggcttctttcgccagctcctggaatttcgtcagcccaatgctgtaaagctctgccccttcctgataacggacgaatttctttgctattttctttgttttctctacatctttacgtgcatatcccatacaccgcacctccttttctgcatgaaaaaagcagctaacctatttttcatagactaactgctcgtgttaagttccatattcagttttattctacaaatccgacagtgaaattcggtcgtatgcgccatttttcttatcttccgggtgtggctccaatccaataattgtaatatctttctggtctggtccataaacccagtacattctcattgcgccactggttttattttccagataagattgccacactttcattccgtaacgtctggataatggctctatttcatgggtttgaagactcggataacccggatcagccgacaacagctttaaagcctttccccattttttatacaactgttcttccttcttttttatattaccggaacgatatttctcctgcagatctaaccaaagttcctgcatttcaggaattcccattcgtatattaaaattcatctctcattccttttaaaaatctgacaggtcaatagcctgggaaacatcgcctcttttaaaattgcttactgcacgatccatatctgccagagttctggctgaaatgcactctggcactgccagttcccgaggttccagaataatgcagccatttccatattcttttacattataatactgataagcagctcctctgagagtaattctttttttgttatccagatgggcaacataatctttcattgcttccattatcaacacctcctacgcaagcatttgtgtgggaaatcccacctcttattattataatacgcttttctatattatctgtcaatctacttttacttactcctgatacttgaaagtattcatgcaccggcagacggcaggtggcagatagggtatctataaaaatctgtatttgcttcgatgactctgccacccatcattcttttaatcgaatactattctcctgcttttcatttacttggtactccaactcattcttcattcggcttctcacatcacgcattgtcctcccggatattccctgctcctttgccttttcgtctaattccctgattgaaatttcttttttatcagcaagcagttccctgatcaattttctccctcgctccagctttgtttctgttgcttttccttcttttccatctaacaattcatctgcggaaatctcataagctcccacccatcgaaatccttcttcgtctcccagtttaaatgccattgtctcccctggtggcgctagcgagcttttttcatgaatcaacacccttgtggttggatcttttcttacttttccgatgaaaatcaagcttcgcactgctgccataatatcaatagaaccaagtcctcgataagtgctctgtgttccggaagatttattcagatgtccgatcagcacaatggcacatccggtcttctcggcaatcattcccagttttcggaacaccggacgcacttcatttgcccggttcatatccacatctgctccaataaatgcctgtaccggatcaatgattacaagccgcactcgattctgtctgactgctttttcaattcgatcatcagatagggttaatgcttcttccgtatcatcaattaccataacccggctcagatctgctcctgcttctatcagtcttggcttgatagtgtcacccataccgtcctctgctgtctgataaattacattgaacggttcaatatcttccatattaggaaataactttcgattggtacaagctgccgtcagcatcattgcaaaataagtttttccttctcccggattgccctgaatgattgtcagttttccaaatggaatataaggaaaccacaaccactccacactggtctgcttaatatcttcataacataacatcggcaccagttcttctgcttctggtacttttattgtgattgtttctgcgattgctttctttctgtcagtatttttatcacagaggatttcattccagtcttttcgcgatggtttcagacgaattacactgtatccttctgagatttctcctgccagtttctcacaagcctcattccctgcctggtcattatccaggcacaggaaaacagaagtaatctgagggcgttcagaaagaaaggtcatcagtgccacactggagactccacccagactcaggtagctgcgtttcttccagtctttgggaaacaactgaataaaagagagcagatcaatggctgcttcaaacacaaacaactgattatccgttcctctgtggcaaaatccaaaagctttatcagaaccggctacatctccacgatatttcatttcaccagttccacggcaatgtgcatatcttggaataccatctgcatctctgccgataaatacaacattatgatgcttcttttcttcgtaaatatctcctctgacaatccattccatcaccagatttttctcaagctctctgctttctgtcagatactttacaatcatttcattatctttatttttctccggtaatcggaagtcttttgacggggcggggcaggacttctgcctgccttcgccttcttccccgatcagcattttcactgcttccgggaatgttgcataataaaattccattacaaaatctaccggataacctcctttactctgactatgccgataccatcggtttccggatatcgttacactgtcatgctttttccaacggtattctctgccactttttaccaactgttctccctgttcgttcaggaaagaaacaagatcggtctggtttgctcttgcaatctgttcttctgtatactgcattttcatcatcctttcctatctgtcctgttgacagactgttataaactcatctcatggttccgtttttccctcactgcctgttgttttgcatcacgctctgcacactctttcttcttttcatccaattttctcagaagagaagtcttcttttctggcttcttctcctgctgattcaccggctgttgctctgctttaccgctttcttcaaaaatatcttccgtctgagctgcgtgaaatgctgggaactttgtctgcttctcgcttttttcttctgaacgcccggaagtatctgcttctgccatttcccggtcacgtctggcaatatctgcacaggtctgtacttttttcacaaaagccaactcatcttgatatggctgcttatctgctttcagctcttcgatcgctgtccggagttcttctttttcccgtttccatctggcagttggcacttttccatttttatccagatgctgtttcagctcccgttcacatttgcgatagtaattgatttctttcttatgctgctggtaatatttctcccttcttttctgaaaatagaaacggttatattcatcaatcaatggctggtttatctttattacttctgccatcttttgtagattttccagtttctttaactgatctcgcttttcggaaatctcttttttactgactgatacaacaccattcagttcatcaatccgttccttcaagtcatccattgtctctatctgatgtgtctgaagataattgatagactttgcaaactcctgtaagttggagagattcttccctctccgtttcatctccgcatagaaatttgggagcggtagtctgccctgtgtctttttatcataataatcttgcaggctttccagaagtgtagggttctgtctgcgatccagttctaccttcatttcttcataagctgtcttcatccactgaatggattctttcaaagaaataaacatctgattgaactgtcgaatagctctgttcagttccccgatgattgttttaatcccctttttctccatcgcccgaacttcatatccctcatgtatggtcggaatcaagtcaattccctgctctttgtaagaacggtgatcaattctggctgccatgtggcactcccggaatttttcatttactttctccgtccacgctcttctccattcctttaaaagctccggatcattccacccggtagtggaaacagcattgaatatatccttccctttagcatcttttatccggtttccatcttcatccagaacatattcccgtttctgcttgttgccccatcttccatcttctgtaaaaggacggattggagcaagtacatgaaaatgtggattatctggttcatcctcattctttgattttccctcatgaactgccagatctacaatcatgccatgtgctacgaactgctcccggcaaaacgctcttgccagttctatattttcatctagcgtcagttcattttgcaaagcaatatcaaaagaataagctaactgtgcccgtttacttttctccaccttttctacctcattccagagtgtttcccgatcagtcagacgttccggcacatattccggcgtcagaatttctgtgaaaactactccagacttttttgtatagtcatgcgtctgtccataataatcgttataaagcttctgccccgaaatatacgctgcggaattaaccactgtctgaccttttcctctggacacctgctttaccgaaaaatgatacaatgccattaactgtcatctcctttttctgctctttcaactgcttctgcaatctgctgttgctctttgtgtaaggctgctatgtaaacctgtcgcacaatactcttgttgtaactactgttctgcaactgttccataacatcctgaacttcttcctgttccaaatctctggataatggaaatgctttttcaaactctgctcctttaacgatcaatctgtgggaacgttcctttcgctccactatccttttcctctgttcaagaatatttttattgtggatcgcatgttccagttcctttttacttttttccatgttggctctcagttcttccaatgacatggattcatatttcggattttttgctctgctcactttcctgtcctcctttttctgtaaacaaaaagaaccggtcttctcataaatgccgattcctggatataaaaaacagaggtcgttgtttcacaataaagaaatactgacctccgcaattttaaaatagattagttattacaataggataggcttcttgccgcaaggggaaattatccccttgtacgaaatctatgatttcgctatattcccggattgaaattcttcaaagtcaggaatggcaccgcaggtcgcacgatacaggcagatgtaattgcctgtatagaagtgcgctcttagctttgctaagagaattatgccgtatccggcttgctatctttaatctgtaaattccatcatctcgtcaatagtacaatccattttcttacaaattttctcgactgtttccattgatacatattgattttttcccatccgggcaaggatatttgcactaatcccggtgaggtgttgcatttctattcgcttcatatttttatcaatgagctgtttccacaatctgttataacttacactcataaataacctccacatttttattagacagatttctgcttttattagtcaaacggattttctccatccttcgcttccataaatccgtctttatctgttttcggagtttctgatgaatctgctccagcaccgctgtccttgttctgggcaaattcatgttcttccacaatcacatctgtggtataaatcgtctttccatccttatccttataactgccagtgctgatgcgaccaccgatcacaatccgcattcccttgtgaagatatttctgtgcaaactctgcactcttaccaaatgttacacacgaaataaaatccgcttcctgttcaccatcacgtttatattttctgttcactgccagtgtatatcttgctactgccatatcattatcttttccggcatatttgatctccggattctttgtcagtcttcccattaaaatcactctattcatagtttttacgtcctttccgggtatgataccctttaatcattgttattagttacttgttgcatcagcggtctattgtgcgtttccctgtcacctgcagccgtctcagactgcctctgcctgcatacacaggtcactgatcataaggctttgatcaaccgcccatcatcgggagtgtcattatgattccgcttgctttcagaaaaagaaaggtcatggcagaactcctggtaggctttcagggtgcacttatcaattgtcaaggttcaacaaaggaacattccaaaacgtcctctaattactaaagtcaaatgactttgcaagatgcaaaagattcgtgatatttttttacatttttatcattttttcttttactttcgttagtcccttcatatactctgtattgggagcgacaaaatcggacatgattttgggaaattttgaaaaataattattcctctacctataaagcgttggaaatggtatttaccaacccctttttgcaagttttttgtacataaatgaaatacttcttcgctagttgcatattccagagaacgtgaggacatggattttcttgaaaaatcatttttccactaatcacatgtggcagaatgtataaagtcagatgattttgaaaaaaagcaaaaaaataggcactaaccacttatggttaatgccctttggggtaatcattatttttcttttgtcaatttctgatacattctcattaattcagcaacacagtctgcttctgacattttaatgctaaatccataagcatgcatcactgctctgttatttgctttatgtgctttcagtaattctgttggcattgtcaaaggatcataaagatctgcaagattgctatctgtataaagtgctctagcattcaagatagcctgtgccgtttttcttatcttttccttttgatcatttgttggagaaggccaagggaaattattataaacaatcatattagaataactataatcactctttagtcgaccacatactgctctggtccatgccatatgaacattggacattagtattccaaactcgtaacttgtggctgacggcattgtaaaaagtttatcgcctggaattatttctccttcaagataatccatcggaatatatcttctgttttgcgaagacacctttggtattgcaatatatggcgaatactgtgcaagttctttccgttgtctttcatcaagcaaaagtatcaacttttctccaatctctctgccggattcagatatatcaaatacagctaatttctcatattttcatctcacaattaaccctatatatttgctgtgcgacgtttttttttcttttgccgtcgagtggcagatgttttatactatgtcactttcataaagttctctttatcctttattacttttctgttttgtctgatttaaaagcaagataaccaaaacagaaatagctatactgcatagaatgtatgtccaattcaaatatgatagattgattaaattctgtgctgattgatttttaatgaagtttgtgtatgatgcgttactcttaatcgcttccataactcctaaaacatttatcgggcttaaattgtataagtacgcaccaaataaatatatcgctattttttcaacaatggacggtattaaaatagccgatgcagaaagccataatggacattgcttgtgggatttctgtaaatatactgcccccaaaagatatggcaataccgcaaggcaacagcccaaaatgacaatattctgatgaagcccaaagagggcgaagaatacacggataaaaagatatgttccaaatataatcaaccaatcaatgagcaagccttttattggtgtgcgctcttttattgtttcgttttgtaactgcatttcattacctcccaaatggacgctccactttcgggaacgtcaaggttacagttgttccaccgcaagaattgttttttagctccaccgtgatagacaggtcagttgccattttctgaacaaggtataaccccatacccgtagaacgactaaggtaactgcccgtatctccagtaaaccccttgtcgaaaacaaaaggtaagtcagacaacggtatgcttgtgccgttgtctttcatagataaagaaatctgttcattatccgcactatcagcaatggaaaagagaagtcgaggagcaggattgttccccgtatatttcacactattgctgattatctgtcctaaaatgaacatcaaaccttttttgtcagaaatcacttgagcatcgttttcggtatattcaacagaaaatccagcttcttcaagaagcgttaaattatcttcaactgcttcacgacaaatttcaagaattgaaagcggctcaaaaaagtaatccttatgagtagccccaagccttgaaaagtatagaatttgttctatatcctgtcgggtatggtcgcgtacatacagcatacgggtatgaaccaaaggggacatttcatcttttcgattgtccagtagcaaggtcataagggatagcggctttttgatttcatgtacccaattttcaatgtagtgttgataatctgtaactgtaattttctgttcgttgatatattcctgctgcgtcctcaaatgctgccccaattcacagatataagggcgtaatactgcgggaacagcttcacacagtaagtattcgttggtatcgtctggctccaatagaaaacgccgaaaaatagcgtctgtcttgttgcgttttctgattgatatagcaagcgggatagcaagtgtggcaaatgatacgaaaatgatcaatgcaacataattgataaaataatctggattagccagccaggcaaggaatataaagaatacgtccaaacaggcaagtgtgataatccatacacgattagaggaaatataggttaaaaatatttttagcttcttcataatcgcacctgctctttcaagcggtagccttgtccgcgtactgtttctatccgttcttcaagaccaaattcacggagcgttttcctcaatcgcgtaaaagttacttgcagcgcattttcgtcaatgcattcttccgttccccaaagcacgttgcacagctcatgtttggtaacaagattagggcttttcttcaaaagcgcaagcaatatttttccctcattgggtggcatgagggaagaactcttccccacataaattgtaaaggtgtttgggtcaagtaaaaatccgttcccgtccagtaagccttgccgtatctgttcctctttgcgtcgtaataaatttttaatgcgggcaagcaggcgctctatattacacggctttgttaagtagtcatcagctcccaatcctaatgcgtgaagttcgtcctgcaatttatctcttgctgtcaataccaacactgttccaagctgctttgcttttaattctttgcagatttcaaagccggaatgaaatggaagatttatgtcgagtaaaaccaaatcgggggaatactctgtaatttccggtattgcgttttcaaaatcaaataacgaggctgtttcataccccgactttctcaataaatccgtcagttcttcccgcatataaacatcatcttcaactaccataattcgtgccaatacgaccacctcctttcacgtaagcctgttatgaattaggcttgtaatttatttttccgatttcccgtgtagctgtccgcgcaacagccacaccgtaaattgccataataagaacgacagtaaatgccataataatcaacaacggataagattgcccgatccttgtgctgtcagagtataaatgctgctgcattgcataaagaccaaccgtaccacttatacaagccaacattagggggagtagaaaataccataaaacttgtttataaattgaccgttttatctgttctcgcctcgcacccaaaattgagagtgtcaaatatcttgattttgtcgattgcatttgtgttaagaattgcaaagcaagcaatgcacacgcgataatcaatagcataaagcccatatataaagtcatgtaactcccggagataagataaaatagttgccgcccgaaattatcaagatagctttcgtaatacagaccggacggcttcagcaaatcgcgtgcttccataacggacagcatcagtccgtttgcttctacaatctcattcggaatacagaaattccaatatacagaacaggtgtccgggtctacatagttatgatatatctcgtcggaaacaatcaatgcggttacaattttaacattttcatcagcagtaagtcctttcatcggtacagacggaacaagtgtaactgactttttgtcaatggaaatcaacgcattaccgcttgtctgtgcgttctctgcaatcctgtctaacagagcaacggtatcttcctgttcatcttctaaaaagtccgggttgaggtaaaaaacagcttcgtcattttcaagatttatttgcttttctcctgcggcttccaacaggcgattatatgatgaaactgggagcatataaggagaaacactccccgtatcaataaatccaagcagattaagggctgcgggttgatgtgaaccaaattcgtaactggcagcttcttgtgtcgcagggtctattacaccctctggcaagttttgaacaatctcttttcttaatacagaccagtcaacaaaggatttcatttccccggaagcaggacgtttcatgttccctgtttccatacggttaagattagctacataaactcgcatttggtcgtcggaaaggtattgctcaacattctgttcttcgcccattactgtaaaatcataaacagcagaagttcttgttaattcattcccatgcgacataatagttgcagaaccatttgcaataaacataatggtaagcatcatcagaatagacgcaacactaattgaaatatatttataaacaacattctcgtgaagctgtcgcaaagtaaatacataaagtccatttgtcgctttccgtttgttagaagcagctactatacttaaaagccgggcaatgcctcggataaaaagaattgttccaacaattccaagcaggacagcaacaagcagcattacaccaccgccagtcatgaagtgttctatgacaacccagtatgcaacaagtaaaactgccgtaccaattacaagggatagcaaacttccgtgtgtgctgcccgtgtgttgtttttttcccatttctccataaagcagttggtggacttctttcttaaacaattttccgcatagtataaacaacgccacacattggatgattaaaaatcccaatatcgtaaagaaaactgcgcttaatgaaaaacttgattgatgtgcaataacaccgtgtccgactaaacgtgccgttgcaaggctgataacttcggatagaaaaccaccgcagataagtccacccaagagggcgacaagtgaagtgataagcccctccgtcataatttgcgtaaataatcgggtctttgtcataccaaacatcaaatataatcctagttcccggctgcgacattcgagctgatacttatttgcaaatactacaaggaaaaatacaaataataatgcacaaacatagacagtaggtaaaaggtttgtaagcagccgttccacggcatcgctttcaaggctgcttaaaaagcgtataacgtcctgcgctccgagagaaagcacaatgtaaaatgccgctaccgccgttaccattgtcagaaagtaaatcagattttcattgcggctacgtttggaatttctccatgcaaggttaaagaacatttgcgctccctcctcccatttgcgccattacctgtaatatgcgcgcataaaattcttcccgtgtttctgtcggaactttgcgacgcaattcatggaaaataacgccgtcctgtatgaacaaaatgcgggaacagaaacttgctgcgttagggtcatgcgtaaccattaaaatggtacgtccttgcacttggttgacttcctgtaatttttccataagcaaccgtgcagcttttgtgtctaatgcgcctgtcggctcatcagccaaaataatatctggattagaaatcaaactacgggctgcggctacacgctgcttttgaccgccggacatttgcgccggaaactttgaaagaacatcagtaattccaagaaatccggctatatcatttaggtgcttttcggctatggaactatctatattgtgaatggataagggcaacagaatattttctctgcctgtcaaattatcaagcaaagcaaagtcttgaaacagataaccaattctatttccacggtattccgctaacttagcaccgtcaaaggcacttatattcgccccggagagcaaaatttgtccagaggtaggtttaatgaccgtagcaatacaatttaataatgttgttttcccggaaccgctggctcccataattcccaaatattcgccacttagaacatcaaaggtaattccgtttagtgcttttgtgggaacgccctctttggaatatgctttgtgcaggtcgcgtacttctaaaagtttttttgtataatccattcttaacacctcttttttgttcatacttttttacaattaaaattttactacacaaagcataaatacaccacttacatttgatgtaaggttcctttgtttgaatttcaccgctattctttatgctgcttttcatctgtcaccagacattctatcttctacaaaatattcactatatatcatagtcggttgaccgagtaataacaacacactatttaccatctatcatatttatccgcattaaaaaaggacgcaggatttctcccacgtcctcacatctatctggctttatcttctcttactttcggtgcttccttatgtgccgcttcctgcttccatcggatcatatggttggttatgataagtttcaaataatcttccccactcaatcccacgcatttcactttccacatcactaaatacaccagaaatccagtctatcacacttgtaaaatatgttttcaattcctgtatgtctgtatcatgacggtgctggctcatatatgcttcaacatcttcatctaccccttcactattttaaatatcttcggtaactatccagaactaaatctgtaacaccgcttttatagattttacggatatcaacaatctgttcatctttcagaagtttcaaccaatccagtaaatcttttctgctgtttgcgaaattgcaacatcttccatcagcatattcaatcctgtatctcatacgctcctcctatacatataccaattcactcaatacaatttcctgcacacgattctcgacattattacactgtcgcacccactccataggattacatgcttttaattcctctgtaactccctccgcacttcgtatttgtgcctcaatcaattcataccgttcctgtgcctgttcattcagatctgccagatagctgtccaatttcccagtcaacagaagataagaatacatacctgatttatagtttttcatatattcttttcgaagcattccccagtacccaatcggtctggtttcttccggtaatgatagcactggcaggtaataatctcctaccaacacataatctaatccattcctgtcatcatgtagtatttttctctgattgctcatgttcttctcctccatcaaatctttctcttctctctcagatatgcttcaaatatacttcttcgaatcaacacctttttcccaattttatatactgcccctgcttcatgtgccatacggacaacgggtttgattcccagtctgtagtattcgcacgccatgttataggtcacgtaatcatggcgcataaattccagatcttcatcatcgatttcatctgaaaacatccatacattaccgctcatccgtcttcttctccttatcatttcctgttgccggttcatgaaaacgctccagatagtcatcaaaaatatcccggttaatcaatacggttccatctattctgtaaattgcacctgcatcactggcgagttcaaaaagtttcttatgagaaatgctgtaaataatctctgcctgttgataacgcagatactgtcggcgtaattttctaagctgctctggtacttccttcatacttgtaattggtttataacttttacccatgatgttttcctccaaaattagatttgctgttttacagaagctgactgccgggatataactttccagggccgaatcatcagacgcgccactggcgcctctttgatatgcaacgcaaaaaagcacctcttagattaactctaagaagtgctcttacttcattgccaaacctgtgtcctttcacctgaaattcgtcatgcttcataacgattcattattatcccaaattttgttgtcaaattgttgtcaaatgcggtctgacatcatggttttagacatttaatatttaattttaatacagctttgcaccagccggaatgtggttatcaaccatcagaagatgaagtttttcttcgccctcttcctcatgaattgcactgagaagcattccacaagattcaattcccatcatggctctcggtggcaggttggtgattgcaattaaggtctttccaaccagttcttccggctcgtaataagcatgaataccgcttaaaatcgtacgatctgtgcctgttccgtcatccagagtgaactgtaacagcttcttggatttcttaactgcttcacatgcttttacctttacagctctgaaatcagacttgctgaaagtatcgaaatcaaccatttcttcaaataatggctcaacttttactttggaaaaatcaatcttctcaactgttttttcagcctctgccggagctgcttcggaagtcttggaagctttcttgtcagcgtccagtgacttcattgtcgggaacaataatacgtccctgattgcctggctatctgtcaggagcattacaagacggtcgattccgtatccgattccacctgttggcggcataccgatttcaagtgcgttgaggaagtcctcatcagtgtgctctgcctcatcatcgcctgccgctgcgttggcatcctgtgctgcgaaacgctcacgctggtcgattgggtcgttgagctctgagtatgcgttacacatctcccatgtattacagaacagctcgaaacgctctacctttgtagggtcgcttggtttcttcttggtgagaggtgatatctcgattgggtgatccatgataaatgttggctggataagctctttctcgcagtactcctcgaagaagaggtttacgatgtcacccttcttgtggcgctcctcgtactcgatatgatgctcgtctgcaagcttctttgcggctgcatcatcaggtacctggtcgaagtctacgcctgcgtatttcttgattgcgtctatcattgtcattcttgcgaatggctttccaaggtcgatttccacgccgttgtatgagatttttgtcgaaccgcataccttctcagcgaggtaacggaacattgactctgtcagctccatcatgccctcgtagtctgtgtatgcctgataaagctccataagtgtgaactcagggttgtgacgtgtgtctacgccctcgttacggaaaactcgtccgatctcgtatactcgctcaagtcctccgacgataagcctctttaagtaaagctcaagggaaatacgaagctttacatcctcgttcaatgcgttgtagtgtgtctcgaatggtcttgctgcggcaccacctgcgtttgaaacaagcataggtgtctcaacctccatgaaatcacggcctgcaaggaagttacggatttccttgagtatctgtgagcgcttgataaatacctctttgctctcctgattcatgataaggtctacatatctctgacgatatctggtgtctgtgtctgtcagtccatggaacttctctgggagtatctggagtgattttgaaaggagtgttatctcctctgcatggattgaaatttcgcctgtctttgttctgaaggcgaagccctttacaccgtagatatcaccgatgtctgatttcttgaagtctgcgtatgagtcttctccgatattgtcccttgccacatatacctggatattgccctttaagtcctgaatattgcagaaagaagccttacccatgacacgcttgaacatcatacgtcctgcgatgcttacctcgattggctttgcatccatgatttctcttctctcgttgtaatcgttgttgattacctctcgctttgcagcgtcatccaagccctcaacatccggagcctttctgtcaccgagaatctcagcctcatgagcattgtaaagctcctttacatcgctgctgtgatgagtgacattgtactttgtaatctggaagggatcctttcctgcttcctgtaaattctgtaatttttcacggcggaccttaaggagctggtttacgtcctgctgctgtccacccttgttattattttgatttgccattttttacctcttttagttctcttctgctctctggatctcgagtaccttgtatgtgagctctcctacctgagtctcaacagttacagtatctccgactttctttccaagaagagctttacctacaggtgactcgtttgaaatcttgccctttaagctgtttgcctctgttgaaccaacaattttgtactcaagctcctcatcaaattcacaatctaagatgcggatcttacatccgatagaaatcttgtcaaggtcaacctcctcctcaacaacaacctctgcatttttaaggattttctcgatttcctcaatacgagcctcgatatcgcgctgctcatccttagctgcatcatactcagcattctcagataaatcaccctgctcacgagcctccttgatcttctgggaaacctctttacgcttaacaacctttaactgctcaagctcatcctcgagcttcttaagacctgcatatgtcagaatatttttcttgttatccatgattcttacccttctatcttctttttttatttttgatatttattgtactcatttagtatattaacttcccacaccaaggtcttcaataccggaaagtatacagtatgttccgaagaaaaatatgaactgccacggagtcccataacacccggcaacggaaaccccgcagcaaagaaaaaccctctatccgcgattcgcacccgtggctaacttcatatttttctgaggaatatactgtatgctatgccggtaacttcgataaactaaatgtgggaagtttcacatactaaatttaaagtctattttaacgcgtgtattataattgaaaatccccacgctgtcaaggatttgaccgatttcaatttttaagcttttccttatacaaaagctcctcaagctgttctaagctctccaccgtattcaccgccgcgcgcagccttgatgaatgcggatatcctgccgtataccacgctgtgtgctttctcatctcgtgtattccagtgtactcgcccttgaactctatcatcatgcgtgcatggcgcagtatcatccggcgtacttcctcaaaggatggcttttcctgatgctcgccggtctcaaagtaatgcagtatctgtgagaaaatccatggattgccctgcgctcccctggctatcataaagccgtcgcagcctgtctgctcctgcatttttatgacatcctctgcgcaaagcaggtctccgtttcctatgaccggtattgagacagcctcttttacctgccttatgatgtcccaatcggctttgccggagtagtactgctctctggtcctgccgtgcactgcgactgcgcttgcgccgctttcttcagccacatgcgcaagctctactgcgttgacatgctcatcatcgaagccctttcgtatttttacggtgaccggcttatctatcgcttttactatactctctataatctgacctgcaagaatcggatttttcatgagcgctgagccctcaccgttgtttacgattttgggcaccggacagcccatgttgatatccagtatgtcaaacggtctttcctctatctgttttgctatctgagccattatctgcgggtctgagccaaacatctggagtgaaacaggcttttctctttcatctatggaaagaagcgactctgtatttttgtttttgtacaaaattgccttggcgctgaccatttccatacataaaaggccggctccctgctccttgcacaataagcgaaatggcaggtctgtcacgcctgccataggtcccagtatcaggttgtttgggagtgtcacacttcctatctgaagctttcgtatctgatgaatatccatactattacttcactcccttgcggttctgcttacgatacacgaggtttatgccctttaatgtcagatccggatcgtatacatccacgttttctgtctcattggatattattctgccgagtccgccggtcactacaacctttgcatcgtacatgcctgtttcttcctttaccttgttgatgatatactctgtctgtcctatctgtccatacacaagtcccgcctgcatgctggtaatagtgtcctttccgaggatattatctggctttttaatctctatctcaggaagctttgccgcatcctcccagagtgccttggctgagatacgtatgcccggtgctgtgattcctcccatgaaggtaccgttttcatcgaccatatcgtaggtggttgctgtgccaaaatctatgaccaaaacaggtcctccatataattcatatgcagctacggcgtctactatacggtctgcgccaatttgctgcggatttggtgtggcgatacggatgcctgttttgatgcccgcctccacgattatcggcctgatattaaagtattttataaggccattctgcagtgaatgcatgatattcggtacgacggagcagatgattgcatcatgtatgtcgtccatgcctacctgatttctttcaagcagagtgctcagaagcatgccgtattcatccgatgtacgtggcattttagttgtaattctaaagctcgcttttatcctgtcaccatcaaacacgccgcatgttatgtttgtatttcctacgtccagtgctaagatcatctgttattcctcctcgagtccttctcccaaaaatactatgcgataatacgtctctatcgactcgagcagttctcttcgctcgttgcggtactgctttatctttagcacgcttcctatctcatcataaaaaaagtcattttccttgcaggatgttctgaaatcgaggtttccgtcctcatcaaacaccagctccagtatgcctcccacatcctctgtatacaggacgcacatgattttgagctcgtcccttatagtctgtggaagtccgttaaaattctcgttcagataatattttttctgatatgcgtttgacacgcaaagtactacctctttagacatatccgtatattcctctcactgatacttctccgcttgaaaccagcttgcgcgattcccatgtgtccacgatcagctcgcccttaggcgtgatgcccatcgcttttccgtcaaacggctccttcggatccagtacccttactgatttgttcctattgaccaacagctcatcatactccctgacgagggctgaaaggtcctgcgtctttaaaaatgtgtcataatactgctcaaagtatgacatggtctctgcgattatctgcgcacggtggaatcttttgccacctgcttctatcatgagcgagctcgccatctgattgatttcctccggaaagctctcattgtgcacgttgataccgatacctacaacaatatggttgatatagtcaaactgcgcattcatctctgtgagtatgccgcacacctttttgctgtttaccacaatgtcgttcggccactttatcatggcttcctcgccggttacgcttgttattgcctttgcgacagcaagcgctgccacaagcgtgagcatggatgcattgtttggattgatatcaggctttatcataagtgtcatgaaaatacctgtgccggacggcgatacccagctgcggccgcggcgccccttgcctgactcctgcttgtccgctacaactaaggtgccgctcggatagcctttttcggcaagctcctgagccttgatgttggtggagtctattgtatcaaaatacagcacttcctttgccacccagtctgtgtgcatgaggctttttatctccgcctctgtcatcagatccggcgctgccataagcttgtagcccttattctgttgtgcctctatctcatatccggcttcctttagctggtttatggccttccacacggctgtgcgcgatactccgaaccggttgcatagctcctgccctgaaatatagccgtcagcgctgcgtagaagtctaagtatttcttccttcatactttattccttagctttgctctagtcagcaagtgttgcacgcatgatagccttgattgagtgcatacggttctctgcctcatcaaataccactgagcgctctgactcaaatacctcgtctgtcacctcaagctcgctcagtccaaacttctcatagacctgcttgccgatagtggtctttaaatcatggaatgcaggcagacagtgcataaagattgcgctatcctttgcattttcaaatgcttttgcatttacctgatatggctttaagtcgttaattcgctctgcccatacctcttccggctcgcccattgatacccacacatctgtgtagatgacatctgcgtcctttgtgccctctgccacatcctctgtgagtgtgattgatgcgccggttgtttctgcaacgtccttacagtattttacaagctcatcatttgggaaatatttcttgtttgtgcatgccacgaagtccatgccaagctttgcacatgtgaccatgagtgaattgcccatgttgtatcttgcatcgcccatgtatacaaatttcacgcccttgagtctgccgaggtgctcacggattgtaagcatatctgctatcatctgtgtcgggtggaactcatttgtcaggccgttccataccggtacgcctgcgtatttagccagctcctccacgatttcctgtccgtatccacggtactcgattccgtcaaacattctgccgagcacgcgcgctgtatcggcgatgctctcctttttgcctatctgtgaaccgctcgggtcaaggtatgtgacatgcattccaaggtcatgtgccgctacctcaaaagagcagcgagttctggtactggtcttttcaaaaatcagcgctatattcttgcctgtgaggtcatcatgtctgatgccttttttcttcttttccttcagctcctgtgagaggtcaatcagataagtaatctcttccggagtgtaatccataagttttaaaaagtttcgtccctttaactgcattgctcttgcctcctgggttttatttgcatcgtttatagatgcaggttgctataatttatatctgtaggttgctataatgatgtcattttactctattttgtggtatgttgcaagaggtttgaagcattgacgctctgactgtaaaactacgccgtacaaataattaaagaggctgcaaaccaacaagctttgttgatttgcagcctctttgttatttctttatatcggctgtatattatctgaacttcatatttccgattgatattcctgagccgtggtcattgaaggatgtgcatcctcctgtgttgtccactccggacattgcctcctgtgctgcactgtagcatgaagaagaaatgcttccgctaagctttcttgcgagctttcctgatgatgccggtccaaactggcctttctggtaaataacacctgagatgctgtttggatatgagctgctctttactctgttgatgactgccgctcctactgcaagctgacattcatagctctctccgcctgcctcgcactcgatgattgctgcaagcagtgtcaggtcatctgctcctgcacttaccgcctcgccctgtgtggtctcagccttctttgatgaagtattttctgatgtatttttctgtgctgctttggctgcctctgcggctgccttttcttctgcggcctttctctccgcctctttctgtgcagctatctgagcctgttcctcttcaattgtgatacccactcttgtgttgagggaacgtgtcgcataatctgctgcgatatatcctgtctgtgaatcgcttactactgcgatccagccatcctgtgcctgtgctgcgcggtccacctgataggtcttgccctggtcagctacctctaaggccttgctgtttgtatctgctgcctctctcacacgaagtccgtctgtatttactgtggcgatttctccgcatgtgtcgtaagcatagcttagtgcgtcagttccggtcacacagtaagaaacattaacgtatccgtctacatttcctgacttgatgtgagcccatgtgccatcgttttctacgatgtctgccacacttcctttatataattttccaacaatatctgactgttcattggcctgtgctcttacgttgagtgattcttcaacgtttggcataagctttgtctgccattcctgctgctcctgtgtgagctgtggctgtgcatcctgtgctgctgccaccatctcaacattttctttttctactgtaacagcattctctgctgtgaggctcttctcataatcaaaaagagtcgctgctacgccggcataactattataaccagtatgctctaaaccagtgtttgctagcaccttatcctctgctttgacctcagagcgtccgctgttagtaaccgcggtaaccgtcagcatagcgcacaatccacagaccgtaatgctctcgattacttttttgtttagcttcatataatcctccatatggtgtagtatatgttgtttttgttaagtttattacacctatgttgcatttgttacaactttgttacaatcggtataatatcacagtaatagcattttgtcaaatttcatggaaaaatctcttgaagcaccgatgaaatcaccccatcctgatgtaccttatgctctatctccagcttgtcgctttcgcttctcgacagctcgtctatgtagtcgctcacctgtttttctattttataaatctcgttgctcaaaagtcttatcctgtgtgagagtgcaatcaaggtcacaatgactgtcagcatgaaaagtgcaagcattatcgcaagtatgcctcccgctatgatgtccatattgtccattgataattccatattaatgtgtcctccctactattctttttccgatacatcattcaaaatttaacttaacctataacgcaggatgatgtactattgattattataaccaattcacttgaacttaacagttcctatcggtcgcaagtttcgacatttgtttggtattgcagggcaaactttcaccggtaacttggtattgacttttattgtgttgagtataatataaatatgagacaaacaggaatgcaagaaaggatacatatatatgaagaaaatagttatgacaggcggcggtactgcaggtcatgtcactccaaatatagctcttatgccggcacttaaggaggccggatacgatatcgaatacattggctcagtcaacggaatggagaaggggctgatcgaagcccaaaagattccttaccacggcatttcatcaggaaagctgcgccgatactttgactggaagaactttacagacccgttccgcgtgttaaagggctacggtcaggctgtaagcctcatgaaaaaactcaagcctgatgtagtattttctaagggtggcttcgtttccgtacctgtcgtgcttgccgcaaagcactgccatgtgcctgccatcatccacgagtcggatatcaccccgggacttgccaataaaatcgccataaagggtgccaaaaaggtctgctgcaatttccctgaaaccatgaaatatctgcctgcagacaaggctgtgctcactggatcacctatcagacgcgagctttttagcggcgttgcggaaaatgccataaagctttgtaattttcctgaccacaataagcctgtcatcctcatcatcggaggaagcctcggctctaaaaaggttaatgaagctgtccgtgagattcttcctgaactactaaaggatttctatgtgattcacctctgcggaaagggcaatctggacaacaagcttgccggaatcacaggctatgcacagtttgagtacgccaatgctgagctcaccgacatgtttgctctggctgacatggctatttcaagagccggagccaactccatctgcgagctgcttgctctgcacaagccaaacatcctgattcctctttctgctgctgccagccgcggagaccaggtattaaatgcaaaatccttcaaaaagcagggcttttcatatgtcatcgaggaggaggagctcacaaaggattctctgcttagcgcagtaaaagaggtgtacggcaacagagataaatataaggatgccatggcaaaaagcggtcagatggattccatcgctactatcattgatttgattaactctcaggtgaagaaatcgtcatagggtcagagtctgtttaaagcgtcattgcatatcataaaaaagaaaaagcccggatatgaactacatttgcatatccgggcttttggttttttaataatgtgtaactattagcagctattacatgctcatctcatcacagattgtcttcatctcatcatcagtgaactccttatggttccactctatgacattcttgttgtcatctgactcatatcttggaatcaggtgcatatggaaatggaatactgtctgaccggccacctctccattgttctgtaccaggttgtagccttcacagccaagcacatctttctcgtgtgtcataatcttctttgcaagctttgctgccttggcaagtgtctcatcctcaatctcaaaaatatttgcataatgctgctttggaaggataagtacatgtccctttgtagcaggacttgcatcgagtattaccttgaaatcatcatcctcgtagattgaattggtcgggatatccccatttgccagtttacagaaaatacagttgtcatctttcatctttgtcacctcatatatataattattttgtaactgttcagaatcaaaaagcccattaaaacggaaatatctgatcaagcatacatcttccatcataataaatatttatcttcatgcagcttctcttacaattaatttctagttgatactatatttattatatctctttttgcgatataaaacaattgaaataacaaatccgcctgcgagtccgcctccatgagcccaattgtccactccctgcgttgaaactccatagtatatcatcagtataaccataaatacagcctgctgtctgctgatgccctcataaaagcctctgtttgctataactatccacacaagtgctcccaccagaccaaatatcgccccggaggcgcctgccgataccgcaaagtcattattataaagcataacaatatacgataatacacttccacacatgcctgacacaaaaaatgtaatcagaagcttcacatgccccatagccttctcgactatctgaccgacagcgcctaaaaccaccatattgttaagtatatgcatcaatccaaaatgcataaacatagaagtgagcagcctccaatactggccatcctttatatactcagggtacatggctccgtgggcagccatatactgtgcatcaagtgtgctgcctgataaactcatcagcacaaaaactattatatttaccactattatgccaattgtcatatatggtttatcatcaagtctttttatattctgcaaatctgtggggcctccttaattttcctgttaaatactttttcttattataaattttaaggagcttatttgcaacaattatacaaaccggtacttaacatcggcaaatctgatgatatcatttgacttgagctgcttcttctgcttgtacgcaagcacctcattattcacaaaggttccatttgtggagtttaaatcctccagataaaattcctggttttctctatttataactgcatgaaaatgacttattgtatccttgcctattaccgcatcggcctcatcgccctgaccaatacgcgtacaatctttgtctattattatattactacggttttccatgccctcatacaaaagcatgccctgtgggtgctccctgtaatcgctcagacatacagtggggtgtatctgacgcggtacaggctccggtgcagcctctgagcttgggtgtataagcatggtgtcatctaccttttcacgattttcttttcgtttttcttttttaaaccattttctgtttatgtccagttttttaggcttttctatcgctgacgtctgcttctttcgctctggcagcctgatgtccagctgctccagcagatacacccgaagcttatcgtacagtgtaggctttatctgctccttaggctcctctactctgacctgtggctgtgaaatcggcgcaaccacctcctccaccggcttttccgccacctttttctgtcgctcctcgattatggcatttctaatatcagcgatactgtaattgccatttatggttttctcgtatatgccatatgctatatgtatcgcttcagcatcactatgatcaagctttgtgagcatatactccatcaaatgttggaatgtattgcaaatggttttcatctgtgccgggtatgctgtaaaatatatttcctcatcctgatttaccccttttatgtgtattagctgaggatcaagcaccagagattctgtgctaacaagatgattctccaaaagctccatcttgttacagatactcaccacaagcttttcaagaaactcaagctttatatcattatactggcagcgcatttccaaagactgaactccggatatatcataccagtactgcccttcattattcacataacacttctccatcttcagaaagcccggaatattgtttttcaacaatatcttttcatctaacggcttcacctcgtcacaacgcagcttcataaagctgcctgtcatctttctttcatatactatttcattagaattcatttacaacctctttcaaaacctgataattatagaaatcatccaccagccacatatcagtagcatactcataagagctgtctgctttcatttcgttatacagcacaagccccatcttcatcgctatcgcaagcataacaataaatataggtataataatcgcaccttccactgtataactgccttttagtccataagataaatctacatttaatttatttcctgtcacataaacacctccgtcagtccatatccaagcagtaggaatggtgtaaatgcaatctgcttctttcttccagccctgcctgatgcaattaaaataacagagattgttcccgctattgtcagtcccatcaccatagtgctgcacactatgtcagcagtcacaaacaatcccataagcgtcacaacaactgcatctccatagcctatctgctctcctgtaagaaacgcagctgccataagcactataccgggaatcagggcaacagccactgatataattgactgcttcgcataaaaagagcttgcaatacctacaatccccattactaccaatacaactaccggtatctttttggttgaaaaatcaattatactgattattccaagtaaaatgataagctgtatcatgttccttctcctttacatttactgcacagatttttgtcatttacctccgatttgtgcaccttgtgtactgtccgcttaagcttactacatccaagctttccgtgatagctcgtgccatagtctgttataaataccgtcgaggtttttgtttttttatccgctgcacagtagcatgcgtggtatttcctaccatctttgtttctgcttgcccccacctgtgaccatttaatgctctttatgctcagatccaggtaattgcattgctcggacaggtgataaacactgccatagtcagtgtaaaatacatatgggtccgtcttttcgccgggatttttgcctgtccattttctgctgttgctataatcctctatccatattccatctaccgtaaaaaagctcaccggaagcttaaccttgtactttgccttaagtgcaacatcatcaccatccatctttgacccaagcagtgacactccatactttccacctctcacgtatgtatcaatgtgcttcgagtcagatatttggctcctgaatagtacctctgcagtggccactgatacaactgacgaatcgtttgcactgctcgctaacgcactcatcctggatgaataatacagagcagccttcacctgcgactccgcctgaaccaccctgaagaaaaaaagtataaatacaaaaaaacctgctacaagcggaaatattaccgcagcctcaagtgtatatgacgccttcaggcaggtgcatgagggcatcttttgagaactatcatcgcctgggagtttggcctttctataaagttttttaatgtggaactttactttattaacaaaagacaccttcatacacctgcctttcttatttcgtcatcgtccataataggaatactttgccttatttttaatggtatactcgttatctgccccatctaaaagattcacaaagcataaaaatatgccatgatatttgtagcttacatctgcactaagctcacagattgcattgtccattctaaagctttcatgcgcaccggtcatacgtactgtagcctcctgcacatccatcgagcgatacgctatatttttcatgctctttgtaaaaagcagcatacccagatatgatttgtagcctattccttcatttgagctttttgccttcacctgccctgtgagcatgcttgtcatgccatacagactcgatgtccatgacgtatcactttttatcagtggaatcttatccccatccaaaagtgcccttaaatccagcacactttcacagaatgcccaggccgccagaattcccttttccaccccttcaattacctccggtgtcagagtaattccaccgataattgccgcaagagccatcgcctgtgcctgctttgatgcacttcctgccaggtatgccatattggcagccgcacgcagagccagtatttctgctataacgatcttcagattatccttatcactcgctctgcctcctatgatatactccacctcatagttaagggcatgattgggatttgtatcagtgtaacagctcatatatgtcagaatatactgctgcataagtactttcgcataccagtcatcactactttcggaccagccccctgttcctttatgcagacttcgcccggacactctggctgatgtatcaatactgtttcctgacaccgtgctctcatcaaccacctgcgataatatgcctgatgcctttactttctgcaccttgaccagcggattttctattgcattaccgccttctgtgctttctgccttactttctgacgtctgctttgctttcgaaaccgatgaaggagcactgtaagctcttggcggtgacgacctcgctatgcttttgcctccgccttcataagctgcattatcctttaaggcatttaacgcactatctattttactgtcatcatactcacccgcagacttgttttcattcaatgagctatactgactgtaaagatttttgactgtttcataaccaatatttttcttcatatatgagacaaccgcatttgtatacacattaccaccatcatccgtcatgagcacatatttcatggattcgagctcatccattgacaaccttagcatactggtgccgtttacaatagtacccccggcaaaagctcctgaatcgcttatcttaaaattatcagtcgtaagcttcttcatatacgacttgacattttcgatatccacattgcccattgcgtcacttccggcgtcatacgctaacagatggtattcatcccacaatggtctgcaatactgtgcaaaaactgactctgctacagcctctgaattcatgcatgctatattggtaagtgtcagattcctgccggcttccagtacagtaaacagaaactgtgacaccagcatgagaagcattgtggcaaatatcgttatactgcctctcacactttaccagcctctcttgagattgtctgaaagatattgtttacaagtgttgtaagctgcttcttaaaaatcagcaccagaccgattaacacgacaattatcagtatcatttccactactcctgcgccatactcatctaataaaaaattcttaaatcctaacataatttttcctttctatatcttaaaatctatgattgcgggtgctattactattgctatgactatagccatcataatcatcatcggcataagcattttggtgccggcctcttcacccagctttaaggctaaaagcctcctctcatcaaatgcatcctccgattccttctcgagcatttcacatacacccttacttcctttgtgaatactctgtaaaataatgcgtacaagcttctgatagcatggcagctttactctttccgcaaaacctgcgtatgcttttctgcctgtcacgccatctgagatttctctctccgtcacaagcatttcctcgtaagcgggcataatattcttatcattatttttccgctcatcaagataacgggcggtaatcctattccatgcctgctccacagtcattcctgaccccatcaaaacagccattttgctgactatctccggatattcgagctgcagttgtatatttctctccttctgcgccgtcttctttttttcctttttctcaagcaccagaagaactataacaacaacttcaagcatggctattttagctgccatattgcttttttcctgcgaccatctaagctttactccatctacctcatccggcagtgtgagctttttagtccctgtctttgacatctcactgtcaatatgtctgttgataccctttatgaggcgctcgcccgcgtccagttcatccggaaataccacaaatgagaaatcatacagctgtctgtgttcgccacaggaaagctcaacacttgcgctaatcagctttccctgttcatcatcaacctcctcaaatgcatcctggttcacatctccattaatatcaaccacatcatagtcactcagtgtccactctgcctccacagctcccaatgcatatgcatccttcataatcacatgccctctgacctgttccacactctggttctcttcacaaaagctgtcgtctatctctttttttgcctgtgtaaacagctcattcgcctgtttatccgaaggctgctcctccctaaccttcagctgatagctgtaatcctcatcgagtccatccgcatttagcaccaggtcatatactgcatcgccgtcacctgtatcattgcgagtaagtgtattatcagttatagcatttgacgacatgtccatgataaaagcaaaaactaaaactataacaaataatgctgctattctaagcctctttcctcccgtcatatgcctattcctacctgtaaaaatttctttgccagtttaattgcccctgcataggctaaaagacatgtactcataaagattaccccgatcaggtttccatatagtgcagacatataatctcttgaagacagctttaaaaatgccaaaagaaatatcggaatatagttcatagtcttttgctcaagtcttttggcagaaaccgcaacctctatctgtcggttggtatcatactttgtccacatcctgtaagtggtagactctatgatatccacaaatctgccgccgcttctctttgcaaatgagaaaatatcagaaaaattgactatatcctccagaccgcttctatgagcaaattctgacagcaccgcctcaaatgtctgattcatctttatctgcctgttcatctcctgtatctcagacagcataagcgaatcattcccatacatgagctccatctctttttcagcctcctgccatgcattctccacagagtatccggccagcatattcgagctcaataccttaagtacattcataaactcttcatttagtttttccttttgtcttctgacaccctcctgcctgcacagctttgcacaaaacgcaaacaccaccggaaaagcaataacaacaataggactgtcataaaacaaatatgcgataatcactgtggcagccatactttttatgaaaacaatcccccaatcctttgtgcacatggaatatctgctgtaatccatataatcaaacccttcataactgttcagtaacatatattcctatactgacagctacagcctttcttactttaaattccacataacagcctatacactaagccctgctgccataagcttgtcggtgtgacaaagtgtccctgctttctttaaaatgccctgtatcctcccactgtccaaaacagcggtttcctcaaaacgatacagcgtatgcagcacaatttcaccacccataaatccatccacctctgatatctcaaggactctcctgcttttatccctcagcctgccaagctggacaataatatctattccagatgctatctgctgccgtatcgcattgagtgggaaatcctgaccttgaagcaccatagtctcaattcttgaaatgatatcatgtggtgaattggcatggccggtggacaacgagccgtcatgtcctgtattcatagcctgaagcatatcaagcgcctccgcacctctgcactcgcccactattatcctgtccggtctcatacgaagagccgtcctgataagatctcttattgtaattggagtaaccccatcggtatttgcatttctggtctcaagccttactatatttttagctcccagaagctgcagctccgctgagtcttcaattgtaataattctctcatcatcaggaatatattgtgacagagcattcaggaaggtcgtttttccggagcctgtaccaccggaaataaatatattgtatttggcctgcgtcagtatctgtagaagccttgccacctccggcgagagagcttctatctcaacaagcctctccatgctcataggatgctccggaaactttctgattgatacagccgagccgcctatagatatggggtttagcactatatttaccctggagccgtcactaagcctggtatcaactatcggtgatgcctgatttacaaccctgttatggcgtcccacaatctgctgtatcacatcctccagcttctcttccgatgaaaaatgacccttgaacctttggattcttccggctttttcatagaatatatcattgggaccgtttaccataatttcagtcacatccctgtcatccaccagctcctgcagtacatcaagcttacgcagagagttgaatatggtgcgctcaagctcagctctatcctttatagtcattggtctgtcgcgtgcctctcttgaaaccacgcttccgattaaatcacatatttcctcatcactcagctctctggacaaatccatttcagaaagtataatatctcttattctctgtccaaaatcatccagcacacgaaataccccgagtcatgtttcttatgacatctccaaactcattccacttccacagctctacaagcttatcacatgtagataccggtatcgtgatgaccggaggctcaatcagcttaatcctctcaactacattgcttaagcctctttcaatcagctcctctgtaaactcgtactctctccactggctgattccgccttttttctgtaccaggtagatatcactgcatctgccaagaatatcaaaaaagcccttaaatcttgttcccatattgagaactatgcagtcatagtgcatttccttgcctagcatctgaagcagattgttgcatattaccgtatttatttcacacagacactctgtattttcaatcggatatacataatccagcttatgctttcttccgatacagctgtttatcctgttggtcgagtatcgtccggattcggccatcaccaatagctcgtccagattatgctccacactctgctcaagcatccgcgataatccactattctcctgaaaatccataagcagtaccttttcattctcactcaaaatagaggacaaagtcatcgcaaaaggcatctgatactgattatcagcaagtgaatacacgcttataagcctcgtctgacctatcaaagagccctcactcgtcaggtctctcacctcaccgcccacatgctttaaaatctcttccactatacggtttacttcctgatatttttccacaaagtatataccctcctcactcttaataggtgtttcctcaacaatctgtatcagtgggatatacttgttattccactggtcaagctcacttgaaagcatgatatctatctcgccctctaagtgttccagctgctctttcatggtatacatatgtatctccagctgatccttataatgattcatgaaatagcatgtcagtctgtcgccatattctgaatcctcaatataaattcctagtctgatttttttcatctatggtactttaaccctccttccatcacctcatgccgtaaaaccagatatctgccatggctgttcccaaaagcacgtataccgcgaaactaacagctttcccctgtccgcggtaccgcataaatctgccacacagtataccgtttaagtataaaaatccatccctcatacgcacaaagagctcctttttaagcaccatacttatgagaccatatcccgctgccgccacaaaagcggctgccatgcacaaggcggtaaatcttaaatttgtaaatgcacatactactgaaaataacttgatatccccggctcctaaaatgcctgaaagatataagaaatataaaatgacaaccggaaaaactatatctggaagaaaccatatgatgctcgctaccttgccccccactaagcgaaatagaaacgcacaaccaagtcccgtcagaatcagccggttactgattctataattttttaaatccccaattgctgctactgtaagcagtatatacagcatgaggtgtgatattaatttcacaatcactgtattttcatcacctctcctttcgtgagacgaattataacaacgcaatcccgattttgtctatagctttttttaaaataaatactttttgttagttatccacaaaatgcagctaaacccaacacattaatccacagtcaaaaccttgattttactggtttttcacatgtcaaaagcactttttacaaaatctgtgaatagaagaaactcttttgcttatacttgtattaagacttattttgttggaggaattcatgaaattatttaaagaaacgcctgtaaatgacggttacaagaccttgcaggatgacatcaagaaaacaacagatgaacttcaaattgtatacactaacctggaaaatgtggttgagcccgatttaattgactactacatctatcaggccaaggctgtttccatgcggtataaatttctattaaactgtgccaagcggcttaatgaggtttaatgaggcttaatgaactaaaaaagaggcctcttgcagtatgagtacagtggataaagctgtcctgcagatgatacttaaagtcaagtgcccccatcagctcatcaagtgccgcctgtacatccgacactccctttctcaaggcttccctgtcctctgacacgagggcagttttcttcaattcatttttcattgcttattacctcgacaatagtgaaagtaccttctcaaaaaaaatctttatagtataatttgcaattaaatgcaaatcgtattataataggcacattaaaagactaataggaggaaacaataatggctagagttactaaggacactatgattggtgatcttcttcagattgaccagaacgtggcaccattacttttaaatatcggcatgcactgtctcggatgcccatcatcacagatggagacaatcgaagaggctgctatggttcacggacttgacccggatgatcttgtcgttgaaatcaacacattcatcgatcacgacctcggttaatttacgaaaagacggcttgcttatgcaggccgtcttttatttgcaatcaatattctgttaaagtactgccagcgtctggatggcagcttcttcaataatcacattaccatgctccttgaaaaatgcttcattggcaggcacatagttcttctgatatgcgtactctgaaatgatattgcacaccttgttgaattccttcggagtatgctcactcttgtgggccacaagatagtacttattgcttgaagcgtcgcggtataagtcatttctgccgctgtaaaagccgtcaagcacatgcgaaatcctgcgcacatcatcaaatttatcaaaaacaaacagcttgactacgtcagcctcagcctgttcctctgtaatatcatcagtgccctgctcactgtcagctgtcttctcattttccttcttgatacgctcaaacagctccaaaatatcagcagctccctttatcaccggaggctgtcctgcatttcctaagtccgtaaagtcgtcatctgcctctgaaaactttgaaaatctggtgtcaagctcatccggatattcaacctttgtgatgataagcactatagactctgatggcagtggaattgcctcaaccatgagtggaatatcatttgtttcaaagccaaactcgtaattggcctgctctaccatatctttaaaaaggcttttcgccttcgctgatccatatgccagttcgcttatttttatatgtctgtcctcaagatcctctctggtaagagtacagcggatctgattatcatttaccttctcaattttcatatttttcacatccttttccgaaaatatccgtgtaaatcgtaaaactattataataaacaccggtcatattgtaaagcgcgaggcctattaaaaaaaaataaaaaaagtgttgcaattattttacaggtatgttataagttatccatgagatgtgcgctcgacccaaaaggagcgtatgaaaaatacaaatcattctttgtttgacaaatatgagatgattaaagatctcggaaccggcagctccggtagcgttacgcttgtcagacacatatctatggatcaggagagagctctaaagaaagttcctaaatcttctgctttcgccgaatccgcattatcagaagcaagactactcaagtctcttgagcatccgtctataccacgtatatttgacttcgaagaggacaatgctttttactatatcgtcgaggaatatatcgacggcgagacgttagattcatttttgcttcatcagcagttaatttccccaggtttattttttaatatttgtgaacaattatgcaatgtttttatctatctgcatacacagatatctactcccattatttacagggaccttaaaccggagcatattatagtatgccacaataagcttaagcttatcgattttggcgtatcggcatatgttatccaggatggaaataacttcaatcactatgggaatatagaattctctgcccccgaatgctttaccgaggatacaattacaccggcggcagacatttacagcttaggtcagcttctgcagtatatactgacctttaccccagacagcttttcccataagtttcagcatattatccaaaaagcaacaacatctgatgcatcactgcgttacgtgactgtcgcagagctatatcaggaaatacaggaaattcaaaaattaaccggtcagccacatctcatacacaaaatagcagttttaggcagtcacagaggctgcggctccacccacgtggccgtttcactcacctgcgaactcaatatccttggatatcatggtatctacatagactcagcaaaaagcgtactttgccatggtaatcacgacggactgcagatttttaagcagaaaaacggatattattattacaaaagctttcagggcatacccgactacagtgacggtatacagtttaatattccaaaggatgctatacagatatacgaccttggcactgatgtgtgcaacgagaaaatatatgacatggatctcgtattatatgtatgtaacggcagcttttggcatctgaatgatatctacaggaatcattctattctcaaaaaaatgacagcttccctgagtgttatatgtaatatgtgcagcagacaggatgcctccgcgattgcgacactacttaattgcagtgtttatcactttccttatgacagcgatatgtttaagagctcagttcaaaaggaaacgctgattcaaaagctgttagaactaaagggaggagcatcactatcagacactttaaaaggatatttaagaaagtccattctgcaccacagttagttggggtctgtggcagcgttcacaatgtaggcacaacacatataagccttgctctttgtaattatatgagcaataaatgcatgtatagaaccgcctatgttgagctgaatggtacacacgaaattctttcactgtcaaagacagcagacgaaaaggtttttacttataagaatgtagatttctttcctcacgcagtcatgtccacactaactgagattttaaacatgagatacgagcgtgtgattattgatttcggcatacttaatccaaacaccttaaaggaatttatgaggtgtgacgtaagaatcgctgtgtgtacaataagtaaatggaaccggggcgcttttaacagaattatcgagctattcaattcaaataaaataactgattcagaaagcgtaaaaatattgtttaatctcgtggaaaagaaaaagacaattaaccataaacattttaagtatccggtggtaggctttccttacttagaggacccgttcctcataaataccagcctgtttggcactctggataagatatcagaaaggaattaatatcacgatgcaaaatgacatctttaaccagctgtttatcaattttatgtccgaagccttcggagggcttatacttttaatgccacagagcgcttcatgacatagggccatttgttacttatcagtttttactcataatcattatatatagacggaggtatttttatagaagaataaactatatttatatattggaatttttacagatattttatcaaattaaacgaaactaaaaatcagcaattaaattgggtgtggaaagctccggaaatatcaatttctataaactgtcaataattaatgattaatatcattttttctcaattatacaagaaatcgatgtcagcatatttttggttctttaccccgtttaaatgcaaaaagacaaccaaaagacatattttaaaaagaaagctatgtgcgcgggggaagcttttgctccttccgcgccaaaatgcataaacaaatttcttaatttattacaaatttatttcatattatttgaatatgctttttcacaatggtataattagcttaagcaatttcgacaccaaataataggaaaggatttttacacatgaaaaagaaattattgcctgcacttatagtaaccggacttattatcctcgttgtaataataatgggtataactgctcttatcaataaatacacccctacgaaaaagacagaggatcttaaagagtatttcaatatctcttctgatgatgaggttgctctcattgtagataatgaggtatccgattacaaggctaaaataatagataaaaaaatatacgttgattacaaatttgttcacgactcattaaattccagattttactgggatgcaaatgagaatgtgcttctttacacaaccgcatctgatatcatctcagcggcggctgacagcaatagctacagtgtcaccaagcagaccaatgactttggctatccgattgtaaaagccacctctgactctgcgcttatcgctttagactatgtaaaacagtactccaatatcacatttaagtcatatgatgacccggcacgcatcgtcatcacaagcaaatgggatgaaatagacagtgcaactgtcagcaagtctacccaggtccgcgtgaagggcggcataaagagccctattctaaaagaggtgaaaaaggatgacaagattactattcttgattccggtgacaaatgggataaggttgccactgaggatggtgttattggatatataaagcgcaaggctctgtccgagagcaaaaaaactaagcttacgaatcctgactatgaggaagagacctttacgcatatcaagaaggataaggatatatgtcttgcctggaatcaggtaacaagccagtcagcaaacagtaaagtgccccaggtaatttcatcaaccaagggcataaatgtaatgtcaccaacttggttttatttaaatgacaacaacggtaatctggcagatatagcaagcaaggattatgtcagctactgccattcccagggcatcgaggtatggggactgttcagcaacttagaaaatactgatgtagatgcagcatatgtgctcacacatacatccacgagaactacccttatcaatcagattatgtcggctgcatttaactatgagcttgatggtgtaaatattgactttgaaaatatcacagaagcagcatatggagactcttacatcgagtttatcagagagctctccataaagtgtcacaataacggtatatcactttcagttgatgtcacagtacctgccagcttcaacaagttcttcaatcgctctgatatggcaaagtttgccgattatattgtgattatgggatacgatgaacactataagggctctgatgccggctcagtttcttccattccgtgggtaactgagggtgttgaatccactctgaaggaggttcccgctgaccagattattctcggcatgcctttttataccagaatatgggagctcactccaaaggaggacgatgatgccgtaaccgataccgaggatcagtcaaagtacactgttgcctcacaggtatatagtatggacgcagctgcagcacagcttgccacaaacaatgccactgctgctcttgatgaggaatccggtcagaactacgctgagtggtctgcatccaacaagctgtacaaggtatggctcgaggacagtacatctttagagaaaaggctcaagctcgtcgacgacaataagctcgccggtgcagcattctggaagcttggctttgagaattcatctgtctgggatactgttatcaaatatctggactgattgcttaaggcttactgaaagaggccgtacctttacagctacagtctaactctgtaccttttataggttataaatgatatcagccaatcatataatatacaaacacacccgatgccttctatgtgcatcgggttttttataggtatcttatatgaaaaaatatatgtacattattaagaaaaacaaatactgtcttattttagctctctttattctgtccttctacctcggaagaggtgtctgtgctcttgcaaaaaataccggcaaaaacactaattccaccgttattgtaattgacccggggcatggaggttgtagataacgcaagtgatgaaaacaacgaaaatataagaaaaagaagaaatttaagagagaacagacaagcaatgtgaaagcacgcgttgccgtataatttcttaataatcagacaaaggcgactcaggtatcgcagtatgagcttgttctacataggggtagcagctggaggattctaatataaaaagagagcaagcataacgtttactctcttctgtatttaagttattttacatatccgctaaatgagtatccatttccttcaaaaacaatataaaactcagtatcgcttttaatattagaaaactcaaaagaaccagttttaccagcactaatttttgtagagccataagtcttagtaagccttttagctgtcacagtaattggattatctccggtgttctctacataaaccttataactcgtttttcctgtaaacttataattagtatacaagttttgataatgagaggaaccagcaaaatcgtattgccctttactcttgatgttccataccttactaggtcttgatgtacctcttgtttcaatagtttcttctggagaaacataagaaactccaacatttggtgtaacggttacctcattacttccatctttaactgactgagcatgaacaacagttgtcgacatcattgtgaaaatcatagacactgccaataaagaagcgaaaatattttttttggatatcttacacatgaaatttctcctttcaccttgtttttttgattaatttataatatcatatttgcaaattctgctcgaacggtacgcctattccgaaatcggcggtacattcattctgatttagtggtacgcgttttctgctttctccggctcagcttttacctcttctgaaggcttagaacttacgccattttcatcctttacgccaccaatgctcttcatcgtcgggagctttttcgctcctgttgtaaagagctgtaagatgatttatatttctttaaatcattacaatattttctttagcaagctgtactaaaataaccaaatttgcagtcttttttggtcatatattagtcatattaaatttttttggtcaattgcctagtcctcaaatcagaggactcttttctatattatatcgttgtttctaaaatacatccatgttcttggcaagtttctccaaagcctctctagtaacctccggatttgcctccgcataaatgttcatggttgtgctgacatcagcatgtcccattacttcttgaataacttttacattggtttcgttctcacaaaaccttgaagcaaatgtgtgtctaaaaatgtgacatgaaaacctgggcaacattataggttctctcttctttttctttgcctctacctcttcttcggcattatgagcatcaacgattctcttgattgcacgatttactgcctgcggattatgtggatttccaaaccgattagtaaatataaagtttgtcattccatcaacctctgcaacacaaaaaccttcttcctgctgacgctggtattcagacttgagcacttcatacaccggtcccatcattggaattgtccttattcctgcttctgttttaggttctgaaaccctaaactcacacttgaatgaattgtcagatcttgtgtaataagtaagactatggttaatattgattgttcgtttcttcatatcaacatcgtcccatctgatgcctattgcctcaccgattctgcatccagttccaagcagaaatacaaaaaacggataccaatggaagaaaaacggattcttcgcaacataatcaataaattctctctgctgctctactgtcagtgctcttcgactctttctagcaccaccatttctttttttcacctcagcataagctccatctacaggatttcttcttataatatcatctcgtactgccagctcaaatgtaggtcgcaatacagtattgatactctccaaagtatttacctgcaatcccttgttcgtaatcaaatccgtatagaaaaataagacatcagaatacttcacatccttaatctttttctttccgaacgtatccctgataaaatgatcccatgtatataagtaatttgcctttgtagtacttcgcaactccgtcttggtagaaatatatctatcaaacagaaaattcacatctgcacttccggcaacatatacatttaatccatccatctgatcacgaacaagttcgtcttctttctgcctaagtgttacaagagatttcgcatatatcgtcctttttttccctaatggatcagtataaatatatgaatacctgccatcagttttacgataatgctctccttttcgtaatactcttcctttaccatcttttctacaagccatcttttctcctttctcaaaaagaaaagagcctgcattacttctggtcagccattagtttctctaatactgccattttaactacttgcgtcatagtcatgttatgatttttggtgtattcaagcaacaattcatgttcttcaccattcagtctgattgtaaccttcttatcagcaggtttttcagcctttggtcgtcccatctttgccaatatatcacctccatctgaacatagtatactttatgtccgacataaagtcaagtatattaatgcaaactctttcatattctttttaatttatttgtagaattcctcgtcttctatatgaaatgtctccagatattcatcaagaatatcaaggttcaccagcaccagtctattcatcttataacatgctttcgcatccttagctaactgctggaactttgataaactcatcgagtacatctctgcaccctctggatatctgacaaatctcttgttatttgttttcttcgttctgttatccattttgtttcatctccaattcctctaataccatcttgcgtgctacaggtaacagattaagctgcattatcatcgctctatccattgcttccctaatctccgattctcccggaatgtaccccgacttaaaacggacacatcccttatttaaagtttgaatatcctccggcataaaatcagatctgttgctcaatgcgtgccctcttatttctgaaggctcaactatcacatgcacaggattatctttcagttttgatgataatggaacaactgaaatctgaggtgcaccaccatgattacttgcatcacacgagactacaattcccggtcttattcccccttgcacaccatgcggatttcgaccaaaatctgcatatacaacatcaaactttttatatttgtcatatcgttttttattcttattcataatctaaaacccccttaactgcatagccagcctgccatcatctactgtaacgataattcctccggcagcctgaacttgcgctacttttataaatgcgtcaataagattgtctgtaataacactcatgtttgcgactattacaccatctacctgcttttttctaatcttatccacaatctgatgccactgtctgtccacatcattctgtgaaaatccatgtcggcgttcagtgccaacaatcatgtattctttattttttacatactcatgaatatatttactctgcttgtcctctaagcgatccactttatccaatggtgcacttactgacagatactctatacattcaatcgtctttttctttcttctcatagccaaacctcctatgaaacaagcatctctgcgttatctagcatttcgttaaatatcttttgaaaatatgccttcttgctgcaatccattaattccagcctggagtctattgaagtttctttcttactctctgccacatttaggattgtattggcatctaccttgaaataatcaattatcttaaatagatttgtgatacttaatgcacgttctccattctcatactttttgatagttgactcactaatgccaagctccgctgcaagaccttcttttgtaagttttctttggattcgtaacgatttaatcacgattccaacttgataaccatcatatttcatcgctatatcctccattgtcctttgccatttctcttaacatctctacagctgcatcttctgtttcatactgaccaagccacttcccacttgaatcatgtacaactgttccgaatgcagtctgagtaaatctgcaatccttcacagccgggacttgtttgtcccgaccggaatgattttctgttgtcgatctaccaaaggactccgttagcatccaaagtcctctgcatgagatacagttattggcaccggaccgacttcaagagaatagagccatatgcccatatctgtgatggtcttaacaaattcttccaaatcataaatgtcatcggtaatctcattcaggcttctgactactacaacctcaaaatcttcctctttaagtgttgcaaagaaagcattcagagcttctctgtcatagtcccttgtcattgagcgatcacaatacgcatcatttattattactccattagatattgcctgatctcgcatactttcaaccatctggactacattgagttccgctctgcgtgactttacaaatgcaataccctttgcagactcctgattatctatttcattgttttctactacgttaaagtttctcttattcattttgttatctcctttacgatttcgtattggagagttttggcgcctccactctcgtggtgtgctgtatcttaagcacatgattattgtatcctgccagcctttaattgccgaccgtgtacaggcgacaattatgtcgtgtaaacacgacaatcactttccaactgacacgcttttcatcgctttcatcattgcaagacactgtcttatctgcaattcatccatatctgaaagaacttccattgcctcagataatagttctgaattttcttcattctttccatacattatgaaatcaacagatacaccaagtacgattgccagattatctaatgtctgtgtcttaaaatctccaccattttcaatcgcagataatgcttgtctgcctatacctgctctatgagctaactcatcctgtgataatcctatcgcctttcttctatcagcaattcgtaatcctctctcataatccttttctcttgcctgtgctttactgctcataaatcctccttgccgcccttggaaacgaacaagtcggattacctttacagcactaaaaaagacgcacgaggaaaccagtatcacaaatactgttcgtttcccctgcgtctctggtgcttccatctttcgatgtgcccttatcaggtgggctgtaatttaattgtcaatcgttatattctgaaagtcccattctcagaatgttccttcatcattccctcggaatacttcttgagtatcatcactcgcttgcatctgtcacacttaattccaatattctgaagtgctacagcggaatcatcaccgcatacaaagtattccatcattaacttgttgcattttttacatctaatttctataacatttcctttgttcaattcagttcgctccttattcatacaaaatcatcaatctacaattctgtactcgtaaaggaaagggaaatcacctttgcaagccttttgccgggagttccgatgaatgtctgcacattccccggctttgctgatctaaagccaactgatatgaattgtgctgtcagcacacaatcatatcaggctccggctctttccataaaccacatattgttatcttcatagaaaaggaatatttcctttccatctaccacacaggtataacgctctccaactccgcctgcccttgtactggctgctctgcgctggtcttttactcgtgtaatctcatactttctgccatcttcccatgttatctctttgggaatgagcagtccgtcctttgaaaactctgcaagtacatcaacatataccttattgctcaatgtaatcaccttccttacaagattgctattgctctggaagcatccatcttccttgctatatagcctttttcttctaatattttcagatgtgcataaacacttgaagtcgatgccacccctaccatcttgcatatctccctgatagtaggagcataaccattcacacgctgatattgcataatgctttcatacacattctgctgcttctccgtcaatggtgctctgtctaccagatcaattcttgctgcttcgctcatgttccgcctccctcttctttactctattggcacttctcgttgctaacctgaaaagtacccatgtggatgtactgtgtgttcttcttttgcattgactgccgacagactcctgtcccggtacatgagtcctctctggatactgtaaaatccaaatctctttcgtatctcatccaccgccgaatccatcttcatctgcttttcacgcttctccacacttgagaacaaatctatctgttcccagtaattatctgtcaccaagtctgcaccacgtactcctacactgcggattggtctgctccagtgatagtttgccttaaataactgataagcgtatgcagctatctctccggtgatgtttgttgcatggtcaatctttttctgacgggtaaaagagaataactcattatccctgacacttatctcaaccactctgcaccggaatccgttctcacgaagtcttgctgcaacactctcagccagaatataaagaacaatctttacatcctcatcgcataccatatccttcggtgtcgttgtgctgtttcctaccgatttgaccggagcgtgggtattctccagtctgacctgtgaatcatcatagccgttggcaaacgaccataagatgctgcccatcctgccaagctggctgttaagcaattcttcatctgtcctggcaagatctcctatggttttgataccaaatcttgcaagcttctggttcgtgctcttcccgacatatagtaaatcgcttaccggaagtacccaagccttctgcttaaactcactcttatacatagttgtgattgcatcaggcttcttataatctgaaccaagctttgcgaatatcttattgaaagaaacaccaacacttactgtgatgccaagctctgacttcattctcctgctgatttcctgtgcgataagcaatccatctcctttaagcgaactgctccctgtcacatcgagccagcactcatcaatcccatatggctcctgcatgtcagtatattctgcatatatctcatgtgccatccttgagaaacgaagatacaagtccattcttggtgagacaaatgttatgttcggacagacctgctttgcctgccagagtgccattcctgttttcacaccgtactttttggcaatatagtcggctgttaagacaatcccatgtcttgcctccgggtcaccgcctactgccagtggctttcctgcaagctcaggatgatgcaaatgttcaatcgaagcataacaacagttgatatctgaatgaagtattaccctgtccgccatcatactcacctcttttcacccataagcaaacgtttgttcctttcgacaggtgttattatatatctctattatagagactgtcaagagacacttatgtccgtttttctcttatatagcgaaattgtgcttgatttatttattcatgcaatatatactatatgggagaacaagactcaaaagataaagtattaatagtagaaaagaggctgattatgaactcagttggcgaaattatagcaacaaacaggaaacgactaggctggtcacagaccgagcttgcagaaaggcttcaaggcgagggctttaacctaaccaataaagccatctccaaatgggagaaaaacgacactgagcccagcgtgacaatattcctcacgctctgccgtatcatgggtgtcactgatatatacgaggcatatttcggaagtaatccggacagtctggtaaacggactcaatactgccggacgtgaaaaagtgcttgactacatcgagctgctgcacgattccggcaaatacaaatcacatgtatgtgaaatacttccatttacgcgcagtatagacgtatacgagactccggtatctgccggtaccggaaatatgttccttgatggctccaaagcaacagtcaatattaactcatctgtcattccaaatgaagcatcatatggtgtaatcgtcagtggtgacagtatggaaccggaatttcacagcggagagattgcgtgggtatcacagcaggataccctatgtgatggtgagataggtatattcggactgaacaatgaggcttacattaaaaagctgaaaagatatgcagacagactctatctcgtatcactaaacagcaaatactctcctattgagataaaagagtctgaccgtctggatgtattcggaaaagtggtcggcaaaattaattctaatgatgtaccagattaccggttttaatgattataacgaaagaagtgattaaattgaaaataattaataatcttaagggaatacggacacagcgaaaaatcgcccaaaagcagcttgccatggacaccggatatgatccgcgcactatccgccgcgttgagctgggcgaatgctgtccgtccgcagaattcatgtttgagatgtccgactattttggagtcccgattgaagaaatatttgcacttgataaatctacagaatcagtacagagaggaaaataaagatgagcgatgcagaggtcaaagatttaaaccagataagtaagaaggatatctaccacactccatccggcaaatatatccagttcatccatgatcattcggaaaaaacatttgatgcgtgggaactcctaccggacggaagtcatcggctgctcgagagccagagcactactattgggacatttgatgaatttaaagaaaaaattataggtaaaaactaacattaatcgttattctttgcttattctaaactctaaaagcagaaaacgcgtaccactaaatcagaatgaatgtaccgccgatttcggaataggcgtaccgttcgagcagaatttgcagtttatcaagccacttcttaatcaggcatcccagataaaagtacatctgaaagccggctatgtagttaaagcccacatagtgaaagctgccatagcatgtcaaagcaattattaaaaacagcacaaataaaagctccattttataattaaaatgtggcagaagcctcgcaaacacataatcagccatatacgccacacaatatatgagaaatagtgcgtataaataccataaaaactctatcggcttccacggtatgcttatcaggctgctaacggcaaccggctcccttatcaaatttgaaaggacaaatttaataatccagtaaataactgaaatcatcacgtaaggcagcaggatattaaatgctttatgacctatccggctaaaaatgccttgtgaagcattccctacatattcactgtataagaagcctgaaactgcgataaagcaaggcatgtgaaagctgtatattacatttgcaataccattcattgtatcatcaaatgaatacatgtctgtcaggcccaatgtagtgtgacctaaaatcacaaataaaataaggatgccctttatgaaatcaattgttttatctcgtgtggtgttggtttgcatgttatgacctttccttaaacacaaccagcttactaataacataattcagcacaataacaataacctgcgcaatcaccttaatcagcatactattaaacccaagccatgtgataaacacaagcaatatagcttcctcaacaaccagtgtaatcactcgccctgaataaaacacaaacatctgctttataaatgcctgcacactatcagtcggtgactgaaatacccagacacgattcgtcagaaatgcaaacataacagttataatccatgaaagaatattggcaataagctcatttattcccataccaacattaaaacatgcatatgtagctatgctcacaataaagctcaatccaccaaaaaataaatacaatagcatctctttgtacttcttgtagaatggattaaaaatcctaagtataggtaattccattaatttatcaaatactttcattccacataaaacctaataaatcacaacctttgttccatttggaatattatcatacagccactttgcattattaatgtccaatcttacacagccatgagaaacttgtttgccaagcgttccatcttgtatatgtgtcatactaccacgattataaagcactgaatggaacaaatagtttccactataaacgcctacctgacatgcagatgtgtctgtcataataagccatcttgtagaactggctcttacctgtgcgttcttagacattacatctaatgctgccggttttggtgtatatacgggcttatttttataataatttgcaacacttccaggtgcaggtgccccctttcttaccaaattaatccttagagcctctactctataactaataccagttgagcctgatgtctgcccatttgaagcccaacctaaccatccataattctctatatgtgaactgtagtatatattataaaatgttgctaactgacctgtaagctttatctcaatagcttctacctgcttagccctacctgaggttccagaatattgccccaaagttttccatccagtccatcctatatcctgcacatgcgttctatacatgatagtaccggttaatgaatgtacagtatcctgagataaattgatattaattccttcaattctcagttttcgtcctgtcgtacctgtaatgtttccccctgaaacccacggcatattacctatatcctgtttatagttctattttatcacatatgcattttatttaaatcgagtaggaggcggtgactaaccgccgtcctctcacagcaccgtacgtaccgttcggtatacggcgctttcaatagtaatcttgcggtatgttactttcagcagtaaacaatcttaaggattcagaggatgaagaacttcatcttcttatggttgataaccacattccagcaggtgcaaagctgtactaaaaacgagatgtaccttattggtggaagttcaaaaattacaagggataataatgaagaacctcataaaggtgagtaattcacgaattgtaaatgtgatggtgaaaaaagtaatagaaaaagtttggcaaacagtaagttgcttggcttgaaaatagtgatttcgaattgacattatcactttggtcataaatgcatagtttatatataaaacggagacgtagaaaacaaggtacaatcagttgttgtattgtgtcgatggtaggcgtataatagtttaatagatgtagaacattacttaaaagtacgattaatgaatgatttgagtgataatccgaaagaagacgggtataatatagtaaggctatttctgcagtaccatccaaatgcagaggcggatattcagagtaaagcagataaatattcattttgttcggatttggcagagaagcatttggatgagtataaagagccgaagaaattagctgtatggaatattgttgaattgttctcttttggaaattttatggaattgtacgaattgtattaccaaatgtatccatcattcaactattctgattatttaaaatctatcaagtttataagaaatgcggcagcacataataattgtattctaagtacgctaaggaaacctaatagtcttaaaaagttcagtaaaacaaaaaagctggcaaatatactcggaaagatacctgaatttcgggagttggataacagggatgctatgatgaaaaatccggttattcatgactttgtaacattactttttgtgtataacgatgttatgaaggtatcggcaacaaaaaaagccagaaatagaaaaatggaagaaatttgtcatctattttgtgatgaggatggaagaataaaaatcctaagcatacaaattttttgcagtagatggttgacaagagtgttgggaaagagtagaatacctttcatagaacaaaaatcgttagaggtttttactagggcggtgcgtgcactaaactagatttgagcttattgaataaaaaggttcactagagaatattgtgtgtgttctggtgagcctttttagtattttaccataattattagtattttgagtaattgcatatgtttactgtaggggtagccgtgctaggctatttccaagccggaaggctctgattttccagataatgattttggagagtcagggcctttcttcgtgctgaaaagcacggctacgggtgcctgctgtcaacatatgagagaacttttggtcaagttggccaaagaaatcgcatagacacaggagctgtggtatactgtgtctatgcgaatttataacagtcttaggacaatgtattggaggtaatgcaatggaatttgaactgcttgcagatagtattaagcaaataaatgataaagcaagttcagcagcaaaaagtgctgtaaatcagctgtaaatcagctcatgacattgcgcaattgggcgattggttattatatagttgaatacgaacaagatggcagcgacagagcagaatatggttctcatcttttgaaaaatctggaaaagcaaattgatcaaaaaggaatgaattatacgctttttaaggcttgtagacagttttataaagtatatcctcaaattggttcgacagtgtcgagcgaatttaaattaccagattttggaaaaagttcgacagtgtcgaacgaatttgtaacagatccagatgttttagttaataacttgtctttttcacatattcgagaaattatggtattaaatgatgcgtttgaacgatttttttacgaaacagagtgtatgaaatgcaactggaatgtaagaaaactccgcagacagataaaaactaacctttatgtaagagctggtatcataaaatacacataacgattcagaaccccatcttgattccgcttacgctgcatctcgatgttgcttctcgctatatgaaattctacaaaaatagctcattcatgtaaccatgattcgcaatttttcttccatttcgcatggctctgaatcgtcaaaaactcgcaaataatttgaaagcagggagttctttcatgaacattacttcaaaataccgctctctttcgattcaggcacgggcggcgctctggtttacgatctgcagctttcttcaaaagggcatttcgttcattaccgttccgattttcacacgtctgatgagcacggaggagtacggtacctacacggtttatctgtcctggctgcagatcctgacgattctgacatcgctgtacctgttcaatggtgtttacgacaatgcgatggcaaagtacgagaagcagcggtagccaacgtagtgctgaactttatttttatccgtattttcggttatgttgcagccggttacacgacgctggcatgctatattctgtattcggttggacactatgtggtgagcaaacggattctggtggcagaaggcattgaggaaaacctgatggatgccggatttctgctggcatgttccgcatttctgattggagtaagcgtaatctgcaatctgctgttcccatacaggatcctgcggtatgcgattctgttcgcaagtgcaggcctggtgttctggaaacgggaactgttgatgaatacgatggcagacatccgcaaaaagtaaatcaaaagaagaaagaaaaggaaaatttacatgagtaccagtatttcaataaaagaattaaaagaactcgatccgtcgagctatcagatcgtggatatccgcgacgcagtagagatttcccacggagccattccgggggcgcttgcgatgaagacagaagaaattgagaccagcgatgcgattgatcggacgaaaaagatgatcatctgctgcagccgtggccggttcagtgtggcagccgcagaagaagcaggacaggaaaaagaagttcattcatgtacagaaaaatagaagaaacgccggcgcggaagattttcagccatctggacacctacaaccggtatgagaaaggcattcgtgagatcccgttggactcgctgatgctgctggcaaagacgtacgactgcagtctcgattacctcgcaggtatttccgaccagccgcgaaaatatggaaaataatgccagaaaccgtaccgcttctgaaaaaatacggttacaggcagcctgaaagagaaaagaggctgtcgcacgaatagcaaatttcggcatccccagtaataattgaaaggatcccagcatcatatcgagcgattcatccggtataagatccccttttcactcaggatattttcataggattcttgacgcttctctaagaaacttttggagatgtacagacgtttattccctttagcacgggaacatcgttctttatacggacagcctgtaggtactcttggttcagtagggtgaccgcctcctgtattttcagaaacatattttcttcccattcgttccaagcgacgtaccatctgataaaacagggcttcgcaggtgtctgccaaaaatccagtacggaaccttgcaatcgtgctgtgatccggtgctttctgaccagcaagcagctacataaagttaatatcacgtttacaagcggtttcaatctttctgcaagaataaatattttgggaataagcataggtcaggatcttgaacatggtctttgggtccactgccggatttatgcctttggtagagtacgcctgatacagtaaactgtaatctaaatcctccaattcgtggctcagcagtcggacagaatcatcatcaggaaccagaccttccaaatttaatggcaaaaccagttgataaggctcgccgaattcggtataatttttatggtattttatgtatttggtcatacttaattataccatggattgcgggctcttcggagtccgttttctgcttttggacataaaaatggagctattgctccatagatgattactcatctattttgcaacagcccacttgacttctcttaattgtgcacatcacctgaagcatctgattgcaaaatttctacagaatggattgcatgagtaagatatgcatccggtgcaatacaggattcaaactcccaaacggtatcgtaaaaggccgaaaaaattcgattcaaactaattttgttcggaatacagatattgtaatacggtgtatttctcctaaaacgcaaataagaaaactcatctgcaaaaaacagtgtcggtcttgggatatgctggtaatcagacagcaaaccattcggcaaaatcttaatctgaagcgcatttgaaatttcatgcagatgtttcatatgcttaaaaaaatgaagacgctgttccggcgaaagctgaattcgataaccatagaaatccaattcgccagtaactgtaaaatctgtaaatgcagaagcataaatcagtgctcttatcggtgtaacagcaagtatctgcgataccagagaatgcattttttgaagtacaggtctgtatgtctttcctataaaagagccatacttatcaagcagctcattatgtaaatcagttggaagaaaatgttctgtaaaatgtccaagcagacaagaagaattccgggcaaacagtgaatgctcatattcgtaagtacgaatcatttcaggaatagatgtccgtcgaataagcaatgtttctttgctgcaaagtaattttaatttgtaataaagttccgttgaaagagacgaatcttcaattgttgtaacagcaagacaatggttctgatcaactaacatacctgaaagcgaataaatatctttaatcgcaaaaaccatttttttctgtgcctgtgttccgcaataaagattaaaatcaatattcgaaagatttgaaagcaaattcatcaggaaaccagccgtataaaccggattatctgaagacgattccaaatcaatcattaaagaaaaatgaactcctggaagcacaagtcctctgtcattgtgcatgctgttaaattcagcaattaaaagctgataattcgtgtctacattcagaatatctaccatagcataaatatttagcgactgtactttacggagtgatggatgtttcatttttaagataaactgatccagtgtaagttccggataatatgaaattttagtagccactttagaaccagttgttacctgaagttcttttacatatgtatattcagattcgagatgatcgtaaatcgctttctgaagattcgaaacgtcagaaatttgatattcttctaaaaaagtgtcccggttatcatcagtcagagcctcaacaatacactggctgatattctgcaaaataatttcgtgatttttttctgttggaagtgattttccactaatccatttgcttatataagattcatcatactgcacagctttggcaagtacataattttttaaattggccatagatgtcagatgctctaacagaacactgaatctgtttttttctttcataataatcaaaagcccctctcttctattataattttagtgtactgcatacaaaataagaaaacaagaacatttatacaaaaaatttcctattgaatgaaatcctgaaaaaaatgaattagttgatttgtttgattcaatatgccaaattcaccacttctattgaaaaggaaaatatccatgatagaatacgaatcgtcattataaaacaaataaataatcggaaaaggaagtaaataattatggaaaatacaggagcaacattaactggaaaagcgagcgttgataaaccatggttacagttttatccagaagcactgcgcaacgttgaagtgccaacaataactgttgaaacgtttttaagagcaaaaaatccagacgaaaataaaattgcatttgaatattacggaaacaaaattacatggaaagaattctggggagaagttgataaagcagcaaaatctttaaagatacttggatttggtgaaggaaacagaattcctgtatttctgcaaagtgttccggcacattttatccttctgatcgcagcagaaagaatcggagctgcaattatctgcagagatgacattccagaagaattatgttttgcaatcagaaaatcaaaatcagagacagcatttgtcatggattatacatcaaagtcagatgaagatctgttccgtgcaacgacaccaatgaagcgtgtaattaaggtttctccatatgattatgcagatagaaaatctgtcccggactatgttgaaaaagaaattgcatccagatataccggtgcgatagagacaacagaaggagatcttacatgggacgagttcctggcacttgggaaagattatacagaagactatatggcacaagaagatgtgaacagaccagtatttggcgcatatacaagcggatccacaggaatctctaaattagttattcattcttcttctaatatagtagcaactgcattccagatgtccatctttattccgccgtcagatgtaccggaaaaatggtggctgccaatcttaccacctgcactgattgcagtaactgtatcaatggcaatcttcccattgtcagcaggactgattatggtacttgatccattctgtccgctggaagatattgatatcgcatttatggagcagaagccaaacttctgggcactgattccaatgttctgtgaaatgcttatgaagagtgacagaattccggaagattacgatatgtctcatctaagaagtatcggaaccggagctgaagcaatgaacgaaaggaaaacacaagaagtagaagcattcttccataagcataatgttaaagcaactttaagtgccggatatggtcagagtgaggatgttcaaactttacacttccaaatccgatgttcccgctggtagacggatgcgttggaatgccaatgccggcaacaactatggcagtattctcagaggatctggaagaactgaattatggagaaatcggagaattatgtatgacgggtcctgctatgatgctccactatgcgggatggagaggtgatgaacttactgaaagaacactgatcaatcatccagatgggaactgctggttacatacgggagataaagcttacatcaatgaacacggaattgtatacattcttggacgtggaacaacaaagcgtttcggtggcggagaactttacatgatgagaatggagacaaaagcagtacgtgtagctggtgtagaagatggattcttctgctttgtaccagatcaggatcatgaaggatatttccttccatatttctttgtaatccttgatgaaacaaagagtctggatgaagtaaaagcaggtcttgcagatgcactggaagaatatgaatatccggtagacatccgcgtaatcaaggaaagaccgtatttccacttcaagacaaacagaaaagaactcacagcagcaattcttgaggaactgaactaaaaaagactcctctgttgcatcaatatgtaaattctatataaataagtaagaaaaaacttgatgattccccgtattttaacaaatcataagatacggggggatttctttattacgtttatacatgccagaaacctgaaaaccagacttttcgatgtgtttttgtgctaaaaaacgtcagtatgtcttgaacaaaacagttagcagtgatatattaaagtaaatacctaattactatattatatgcaaaaatatatgcaaaatacgaattacagtagcatataatagagggtggagtataaataaaatacaatggaaatgaggtgggggcaaacaaaaaacgtaatatgaattgtctaatacaaacacgaaaggaagggtagacattatgaaaaagagaagtaaaatgcttttgagtttattcctctctactataatggtattcagtgtagtgccttcaacagtttttgcagagcctgcacatgaagaaacaccagcagtgcaggaaaatactacagaagccgtgcaggataacaccaatacaaatgaggcagaagatccagcaacagaagattctgtgacagaagatgatgcaacagaagcaactactgattcttcaaacacagataatgatgctgtggcccagacagataatgatgaaaataaagtaactatttcaggtattacaatacagacaccagtcatccagttcaagggtgctaatgcagcagtagcagaagcacttacaaaagatataaagattgatgaaagcgatccggcaatccagagcctgcgtgaagcattgggggatctcgaaatggttggcggagaagccggcacagaatccaatgaatctaatatcagcacagcagacctgtatgaagcagatgaacaggctgaaaccaagaagctgacagcagaccagattaatacagttgttggtatgtatcagcagtatctgaatcagtggtcagccaatgctaatgtactcggtgttcagaatccattctttctggatttcaacgatgatacagatggtcttggtatccttggtgagatgcttgccttagacggcaaatctgttcaggatgtcagagatggcaaggtgagctacgatgacctgacaggtatgatctttactttcacatatggtgataagttaggtattaagtattatggtccagatgtaacaaatgcaagagatgaagctcttgctgcagttacagcatcagaggtgcacagacaaaggcacagaagctgcttgttctgaatgactggttggcccataacaatacatttgatatgtcctacatcatgaactctggtaaggaatcagatgatgacaagccgatgattgcaaaggatcctcagaagcaggagcatgaggatgaagtttacaatgagatctataaggtttacgaaccacagatcaaacagaatttccatgatcagatttatgcaggcattgagaaggatttgcttgtaaaattttataaaaaagctattgctcagactttggtgaaggctggacagtctgaggaagatgcgaatgcatatgtagaagctaataaagaagctatcgagaaggatccggaagcatttgtgaaagaaaaccttccagacgcagcagaaccattgaagcaggaggcagataaatttatcaaaaatgctgaagaaaaaggcgttgaggtttctgaaggcgttacgatgactgttgagcagcttactcagcagcagttagatagcgctacgaatcaggctgcaaccggtatgacaactggtgtcatcaactattgggaaggtactcagtttggtgcattcggtatgggtacatctgtatgtctgggttactccagagctttttcatatcttgtgcagtgcctggataaagatatttatcttaaagatccaagtaaaggttatgacagcaagaaaactgttacagcagatgatggtacaacttcagaagtatgtgataactggaagacagccaaagaactgtactatggttcagatggtaagacactggatatcaatgcaggctacacagttgaccttgtaagaatttccttccagtccaacgttacaatgtatggcgaagaacaggaagacttcggttccgaccattactggaatgcagtcaaggtggatggtcagtggtactatgtagacccttgttatacagatgtctacacagaagttatgagtcgtgaccgtgtcgagacagatggtgatatgaaccatgtcttcttcctgttcagcgatacagatgcaagaaaattgtatcagggtaactttagtgttttaagatcactttatcagaatgaagcaacagatacaacatatgaaaaagcatggatggctcgtgcagcaagtaatgtttactatgcagatggttatgcttactatatgtatgattcgacagacctgtttgacagagtaagcagcacaagcatgaatcagagccagaaggctgcagagtacaagattgttcgtcataaactgacaaataaggatacaggcgatggcgacagcgattatgagacactgattaatttcacagacaagaaaaacgacgatgatgacgatacatttgtaagcgttctgaacaaagacggtaagatggagaagaatgatcttctgaccaaactgtatgcacagtttgtggatgaacagagcatttacccatccatcggtctgacagcagcactgtatacagatggtaagatttacttcaacgtatccaacgatatcgtttcctacaatcctgcagacggtgcagtagccgttgtgaaggaatataacacagtatctgcaaaacgtgatacaaccaagttatttggcggtatggcatttacaacaacagatgaaaagagtgcagatttcactgtcacaaatcatccaatcgcaggtctgactgtgaagggtgacaaactggttgtttcaatcggtacaaacttcgcgttcatttcaggtaagagcaaactgcttgaccattccagctacggttatgaattcgaagagacagattacaatccgacttatacaaactacaagaagtatcagcagttcatgggcagtcagagcaatgataatgacgagttcatgtggtcagctaacttcgttgatacagttgatatgaagacactgacaggtacttctcataattatgaaacagtttctgaacctgcatactgcggacgtaatgcatttacagaagaacgttgttctgactgtggtctgatcaaagcgggcacacgtgtagaagcaaagaatacagcacacgaacatcattacatcaagttccatgaaacatactatacaaagactgatagcggtagctggaacgaagcggacaactatgtttgcccagagtgcggtgcttgtattacagaacctgttaagcccaaatatgaacaggctaattctacatacgagaaaagaaaagctatctgggatgaagctcagaagaacgcagcagaaggacatgcttacacagcaacagatgctgagtggagcgatgatcacacaagcgttacattccagaatctgaaatgtgaaacttgtgcaaatcagatcaataaactggattgtctccttgaatcagatgaaaatgcaacaaacaaagctaacagagattctattgagaaagctcttgcagaaaaagtaactgcaacggctaaacttgttagtcacactggtacatgtgatcagggtgtaacatctacttacaaagcaacaggtaagacagatgatggttacagatatactgcatctgataagaagacatctgacgcaggtcagcaccagtacacaggtacatgggcatgggaaccagtaaaagatgacaacggcaatgtaactggatatacagcatctgtaacaggtgttaagtgttctgtatgtgatgatgaacctaaagcagagcagattacagttgctgatgcagttaaagatacagagaaatctgtagctgcaacatgtacagaaaagggtaaagatgtctatacagcaacagcaacagtaaaggatgctgaaggtaagacagaaattggtacattaacagatacatatgaagttgaattggcagcccttggccataagtatggtgctcctgtatggaactggacaaagggtgaaaacaacacttacacagcaacagcaacatttacatgtgcaaatgatgagaaacatgtagaaacagttgatgcaaaagtaactgagaaatctgatggcgcaacatgtacagaggcaggtaagattacttacacagctacagttacatttgaaggcaaagattacaaagatactaagacagaagaagtagcagctctcggtcatgactacaaagtctcagaaaaagacggatggaaatggacagctgataaagaaaaaggatatacagctgttgcaacattcgtatgcagccgttgtaaagattctcatgatgtaactgcagatgttgttaaagaagacaagaacagtcagatcatctacaaagcaactgctaaatacacagatgaaactggtaaggaatttacagctacagctacaaagagtacaaaaatgtccgtatcttacatagttcactgtcaggattatggctgggaagaagaatggaagaaagacggacaaacgtctggtacagttggtgaatcaaaaagattagaggctatccagattaagttaccaaatggtgtttctggatctatcgaatatcgtacacatattcaggacatcggttgggaaaagaactggagtaaaaacggagaaaaatccggtacagaaggacagtgtaaacgtctggaagcaatccagatcagactgactggtgaagttgcagagaattatgacgtatactacagcgtacatgccgagaacttcggatggctcggatgggctaagaatggcgaagaagcaggaacagctggttacggataccgtcttgaagcaatcaagattcagctggttaccaaaggggacaaagcaccagaacttattggtactatcaaagaagctatgaaagcaagactggtcggataccagacacatgtacaggactatggtacacaggcatatgtatatgacggtgctatggcaggtacagaaggcgagtgcaaacgtatggaatctatccgtatgaaactcccgtcttcagtgaacagctcaatccagtacagatctcacgttcaggatattggatgggagaagaattgggcatctaacggatcattatccggaacaactggacagtgtaaacgtctggaagcaattcagatcaaactgtctggtgatgtagcaaagaactatgatgtatactacagagttcatgctcaggattatggatggcttgcatgggctaagaatggagaatcttcaggaacagaaggatacgcaaaacgtctcgaggcaattgaggttcgtctggttccaaagggaacaactccagaccttccagcatcagcaaatgaaaaagccttcatcaaaaaaaaataacaaagcttaacttgcaaggggctgtcgggaaatgaaccgctccccgtcaagtagacaattgaaaaaatataaatttttcctgccagtagaaatttatctgctggcagtttttatgcagctggcaagtaattttcgtgtttttccattggcgttaaaattccaagattcctttgcaagcgtttattgttggtaagcgtccaataagagggtgtatcgaaatttctggctgttgcatgtaaactattgattagagttttgggagttgactctaaaaactctaaatctaatctaaggagcaggcttatggatctttcttctttgactccagacaaacaggtgaaacttcaatactggctggatgtaatacggcaatgcagggcctccggactgacaaatcagatctggtgtgaacaacacgatatctatttgaaaagttattattactggctttccaaaattcgaaagcttgccctggaagaactgccccgcaagaaaaacggcatccacatgtgtacagaccaacagtcaactgctttaacggaatccccggctgagtttgcggagctttcacttccggacagaaacatttcccgttccactcctgcagccatgttaggagagctttcccatgtggagaaaatctatatccgatgcggctacaccgatatgaggaagcagctcaatggcttgctggatatcatccagtacaacttcaaactggatccttacagcaattccttattcctgttctgtgggaagagggctgaccggatcaaagcagtccattacgagggagacggtttctgccttttatacaaacggtacgaaaacggacgtctccaatggccgcggaccggcgaagaagcaaaacagatttctgatcagcagctgcgctggcttctggttgtctatcgggactggcttgtacacatcgtccaccgtctgaagctggaacttctgaaacagagataccttcatatcgatgaaacacatgtacaggtgctgaaagaaccgggacgaagcgggaaatatccggaagcgtttctgagggaatatgaaggttatatccatacagacgcttactccggatacaatgcagtttcaggagtaaaaagatgtctttgctatacgcatctgcgccgggctttcgtggatgcgctccctcctgatcagaagaaaaaagaacgtcttatccgcgagaaaccgcttctcgaggctttttggtcatgggcagaaaaaagtgccatcggagagctgccgaaatccaaactttcaaaagcttttcattacgccttaaataaccgtgaaggtttttggaattatctggaagacgggaattgttccatcagtaattcgcttgcggaaaactgtatccgtccctttgtgatcggcagaaagaactggctgttctccggcagtccgaaaggggcggaagccagtgcaggaatctatacactgttttatttgacgcttacggccaaagcatgatcaaattgagatattgggttttagggtgtaaccctaatgcgcacgacataggagaacggattttttgcataaagaccatgtcactttatgcgtatcctgttatatttctttattcccattggtatgaaggctcggacaattgatttttaatccttttttgtaattagcattttcaaactccaagtaatagttagagggcataggaaaaggagtgtgatgggaattgaaagaaagattaagaagccttcaaaagtacattgaggtgtatcgatgcgtagggatagataaggtacttaagactattccgtgtagatttgcttattcggtagcaaatgagcatgtggatgaaaagaagtttcatgagaaagtgttgtatcgcatgcgacacaacaaatatgactcattgagaaaaagctataacaaggtaattaagaataaagtaaatgatgtcaaacagggattgtatcagaccatctatttgacgttaacaattatggctgaagatgtggctgatgcaaaagctcatttagttctatggagagtgccataagaagtgcttttgtggggattggtgttaatggtattccgttaataattaatataaacataatcggttgttgatgcagctctctgtaaagttgcaattaagcggctaacagtattatggttccggcggctgttgttaaaattgtttgcaaccagataagcggattgtgattccccatattgttcgggcttttgaagaggtgttgtcgatggaatctaaaacacatcctaatccagatggattattgtagctctacaaaataaatataagaatagaaatagattataaaaggtttgttgggcagtatagcctaatgaagcctacagaaaaaggttgcgtgaagccacataaaaatgtataattaaaagtaatgaatttcatattaaatgatattggaggtactcatgtcacagtcggttacgataaagagtaataaatatggaatcaatttagttttagatgcggatatgtcatttgctgatttgataaaggcagttgtagagaagtttaaggcatccgccaatttttttaaaaacgcaaagcttgctatttcatttgagggaaggcatctttcagatgatgaacagcagcagataattgcagctattgaggaaaataccacaattgagattttgtgcattgtggagagtggtaccgagcaggaagccattatgaaggagcaggttgaggcatttaatgaggcagtgcagaagcagtgcgagaatgttgcaacagtcagtgttccggagcagttttaccgtggtacgctcaggtcaggccaggtgattaccagcgagtcttcggtcacaatcataggtgatgtcaatccgggagccaagattatagctcagggcaatatcgttattcttggtgcattaaagggaaatgttcacgccggatgtacaggtgacaggagctgttttgtatttgcacttgacatgcagccgattcagattcagattggtgatttgattgcgaagagtccggacgagcctcagccaaagcacagggtaaggcgcaaggaaaagccggtgcaggagcaggcacagatagccatcgcaaaggatggatatatttacatcgaaccaattactaaaaatattttaaatagcatttaggaacgtaggaggaagaaagttcatgagcgaagtaatcgttatcacatcaggaaagggtggtgtgggcaagaccacaaccacagcaaatatcggtacaggtcttgcacagttaaataaaaaggttgttatgattgatactgacatcggactgcgtaatctggatgttgttatgggacttgagaatcgtattgtatacaatctcgtagacgtcgttgagggcaaatgtcgtatccgtcaggctcttatcaaggataagaaatatcctgatctgtgtctgcttccatcagcccagacaagggacaaggatgctgttacaccggagcagatggttgagcttatcaatgagcttcgtgaggagtttgactatattctgcttgactgcccggcaggtatcgagcagggcttcaagaatgccgttgcaggagctgaccgtgcactcgttgttactacacctgaggtatcagcaatccgtgacgctgaccgtattgttggccttctcgaggcaaatgagatgaagcgcattgatctgattgtcaaccgtctgcgtgtcgatatggttaagcgcggtgatatgatgaatgtggatgatgttacagagatccttgcagtcaacttaatcggtgcagtaccggatgatgagcagattgttatttctacaaaccgtggtgagccgttagttggttcagacagccttgcaggaaaggcatatatgaatatctgccaccgtatcatgggcgaggaggttcctttccttgatttaaaccagaagcatggtgtatttgaaaagctaaaggatatgtttaagaaaaattaaagggggatacgtaccatgggtataatggatttatttaaaaagaaatcttctggtaatgttgcaaaggatcgcctgaagctggtgctggtttctgaccgtgcaaactgctcatcggagatgatggagatgatgaaaagggatatcattgaggttatttcccgctatatggatattgatgcggaagctcttgatgtgaaaatcacagagacagagtctgattctaacaacggaatggttccggcacttgttgccaatattcctatccgtgacatgaagcatcgtccggatccaagatagagtaaataaaatagtaggatacgataagatatgagggtcaaaaggtattttggccctttaattattatattgaataaaaagacttgatttgatattagagtgtgatatactttaatacgttacaaataaataaattttagcagagtagacacatgtgcgttaagtgccggatgaacagggagttgtcacccggacgaaaagaaaatcttgcggtacatgagtcgcatcccgctgcatccgaagatattaattatctcctgttgtagttcggtgaggtctgcaaaggaggtaattttttaatgaaaaaattcgttactttgttcaccgattctgcccgagagcttaaatcggtcagaaccatcacaactatggctatgcttgctgcagttgccgttatccttggatatttctccatcgaatatggacagtttatccgtatcggtttttccggtattccaaatggtatcgttgattacctgtttgggccggttgccggagctgttttccacggagcgcttgacatcatcaagtatctgatgaagcctacaggaccattttgtccacagcttacacttgttgtaatgcttgcaggtgttttatatggatgtttcttttataagaaaaagcttaccatatggagagtgcttgctgcgaagtttgtagtaatgctcatctgcaatgtcattctcaatactctgtgtctgcaggtgctgtatggacaggcgtttatggcaattcttccaatgcgtgcacttaagaaccttattatgtggccgatagattcaattgtcttttttggcattgcaaaggcactggagcagattggattgttccgtaccttccgtaaaccggagcttataaagaatgcatagcaacaggtgaatggaccgggtactcaaatgagagtacccggattttttatttaatggaaagaaatacgtataatgtggtatgtgtatcatgttctttataatatatataaatgatgaaaaggaacatagcaacagaataatgtacagacaatataatgcacaaaacattacattaaaataatattttaagcattaaatggcgatttatgttaataattttaagaataaacacctttaaagtgacaattatgaggtatttcgcatttttaatgaaaattgttgacacaatatattgaacgtgatattgtttacttgttcaaaataatacacaaaagaaaacgaacaaacaactacatattaattatgaatatttaagagcaaagacgctaaccggtgaagcactttgctcttttttatttatcaaaatcacaaggatatttaaattaggaggcaatatattatgaaattaaaagacacaggattaacagcacaggacatcaaagacaaagtaaagaagtatatgattgagacatatgagcgtttcgatttcatcgctgagactgctgagggcatgtatctatatgatgagaatggcacaccataccttgacttttacgcaggaatcgccgtaaacaatgccggcagcagaaaccctaaggttgttgcagcaatcaaggatcaggtggatgatatcatgcatacattcaactatccatataccattccacaggcactgcttgctgagaaggtctgcaagactatcggaatggacaagattttctaccagaactcaggaactgaggcaaatgaggctatgattaagatggctcgtaaatatggtatcgagaaatatggtccaaacagatatcacatcgtaactgcaaaggacggcttccacggcagaaccttcggtgctatgtcagctacaggacagcctggaaacggatgccaggtgggctttggtcctatgacatacggcttctcatatgctccttacaatgacttaaaggctttcaaggatgcttgcacagagaacacaatcgctatcatgattgagcctgtacagggcgagggcggtgttcatcctgcaacacctgaattcatgaagggacttcgcgagttttgtgatgagaagggcatgctcctccttatcgatgaggttcagacaggatggtgcagaaccggagctgtaatgagctacatgaactacggcatcaaacctgatatagtttctatggcaaagggtcttggcggtggaatgccaatcggtgctatatgtgctacagaggaggtttcaaaagcattctcagccggttcacacggtacaacctttggtggacatcctgtatgctgtgcagcagcacttgcagaagtaaacgagctgcttgacagagatcttgccggaaacgcaaagaaggttggtgattatttcgcagctaagcttgagaagcttccacacgtaaaagaggtaagacatcagggactcttagttggtgttgagtttgacgatacaatctcaggtgtagatgtaaagcatggctgctttgaccgtcatatgcttatcacagcaatcggaagccatatcatccgtatggttccaccgcttatcgtaagcgaggaagagtgcgacaaggcatttgatattataaaggaaactgttgagtcactttcatagaaggtttgaattatatttgaagcaggcaacagaatatattgcggcagattttacgagccggataaaaggacaagggcgtcacgattagcttcgtgcgcccttcttttaaacaaagaatataggtaactaagcggaacaagtttatataacaacatatgattaaagggtcaaaaggtatcgtcgatgcataccttagcgactttcatatcaacatagcataaagatgtatatataagaaaagcgaggggaacgaaatggcacatcttgttattacaataggatgcgaatatggcgctaaaggaaaccagattggcaaaaaggttgctaaagacctgggaatcaaattttatgacagggatactgtagatgaaatcataaaagaggtcggtattccgaaggatatcatggaaaaggttgaggaaggtatcactatcgccggaaaaggtgcagagggtgatgtcagaggctctttctccaaatatgcagacctcacagagcgtgcaattcacgtccagaaaaccataatcagaaaattatcagaccgtgagtcatgcgtgattatcggtcgttcagcagactatatactaaaggaacataaaccgattttacgtattttcatatattcaccggatgaagtgaggattgaaaacgtaatgaagagccacaatttgtcggaggatgatgcaaagctttttatcactgaaaaggataagcgttatcataagcgtcatatggcgctgacaggaagcaaccgaggcgacagacacaacagggatatgcttatagacagcagcctgttaggagtggatggcacagcggagcttattgagtctctggcaagaaaagtggtagaaaatgaaagtaagacagaagctggaggtgacaagtaatggaacagaaaaaatcagaatttaacaaagtcctgaatgcctgggacgtacttgtaattgcatttggagccatgattggctggggctgggttgtctcaaccggaggctggattgaaaagggcggagtgctcggtgccgcaatcggcttcgtaatcggcggtatcatgatatttttcgtgggaatgacctacgcggagctgacagcagccatgcctcagtgcggtggcgagcatgtattcagctacaaggcaatgggttcgacaggttcattcatatgtacgtggatgattatccttggatatgtcagtgtggcatgctttgaggcgtgcgctttcccaacaatcatcacatatctgtggccgggctttttgaagggctatctgtatacggtagcaggctttgatatttatgcttcttggcttattgtggcgatagttgtggcatttttaattatgatgataaacattatcggcgcaaagacagcagcgattttgcagactgtgctcacatgtattattggtggcgccggaattttgttgataattgcatcggtaatcaatggaacagttgataacctggatggacagatgtttgcaggcagctctgcaggtctgaacgtaaaggcaattatcggagtggcagctctgtcaccattttactttatcggatttgacgtaatacctcaggcggctgaggagatcaatgttccggcaaagaaaatcggctcaatacttatcttatcagtagttctggcagttgtgttctatgcacttgtcattgttgcggtaggtcttgtcatgggcccacaggcaattgttgattcagagcaggcaacaggacttgtcacagcagatgcaatggctgccgcattcaacacaaagataatggcaaaggttataatagtcggcggaatgtgcggtatcgtaacctcatggaactcatttttgctcggtggctcgcgtgccatgtactcaatggcagagtcatacatgattccaaagttttttgcaaagctccatccaaagcacaagacacctatcaatgcactgattctcattggagtactcacaatgcttgcaccttttgcaggcagaaaaatgcttgtatggatcagtgatgccggaaactttggctgctgtgtggcatattgcatggttgctctttcatttattattcttcgcaagaagaagccggatatgccaagaccttacaaggttcccgcatacaagttctttggaacgatggcggtcatcatgtcaggcttcatggttgccatgtactgtataccgggaagcggcggaacacttatcgtccaggagtggggcatcgtgcttgcatggtgtgcgctcggcgtggtattcttcgtcttctgtaaaaagaaatacaaggagtcatttggtacacttgttgagctcatctcagatgaggatgctgcaacacttatgccggaggcagatgaggttgaactggataaggttatcgatgctgcaatagacagggtacttgccaagaaagcaagctaggaaacagaaaggacagattatatatggaaacatttaatttctcggtgccacaggacatcacagtgggaaagggcagtctttcaaagctgccggaaatagccaaaaagcttggaggtaagcatgcactcatcatttcaggacctcatcttgagaagatgggacttgtaaaaaaggcagcagattatctggcatcagttgacataaaagcagacacttttacagatatagaggcaaatccatctgtcacaacagtggagaaagccacagcaaaatacctgtagtcgggcgcagactttatcgtggcattcggaggcggctcaccgatggatgtggcaaaagcagtgggtgtagttgccaaatatggcggaagcgtcacagactatgagggagcacacaaggtgccgggaccaatcgtaccgctcattgcgataccaaccaccgcaggaaccggctcagaggtgacagcattctctgtaatcacagatcatagcagaaactataagctcacagtattcagctacgagatattgccaaaatatgcaatactagatgcagaactcatcacaacagcaccggcaagcgtagcggcagcatgcggaattgatgcatttatccatgccgaggaggcgtatgtatccacagcagcttcgccattttctgatgcactggcagaaaaagcgatggcacttatcggaaaaaatatccgcagatttgtagcaaacagaaacgatatcgaggctgcagaagctatgatgacaggctcactttttgcaggaatagcattctcgtttgcaaggcttggaaatgtgcatgcaatgagccatccggtcagcgcatttttcgatgtgcctcacggagtggcaaacgcagtgctgcttcctgtaatcgcagagtacaatgcacttgcagatcatggaaagtatctgactatctacaatgatataagcccgattcctgcgtatgcggacgaatttgagccgatgatgctggtagatgcaatcagggagctttgcacagacatcggaatcccggagaatctgaccatcgcaatcaacaatgccagcaaaactggaacagtcacaaaggaagagatagaaagcaagatagagccgatggctgtcgatgccatgaagagcggcaacattgctgtcaatccaaggacttcacgccagtgcgatatcgagatgctgtatcgcagggcactgtaaacttataaaatacaacatgtaaggtaactgttccgaatagttaccttacatgtttataaacagtatagttagaaaattaaatgcaaaaacggagatatgagtatggattatctgtcacacaatgtatctgaaaatttaaaaagaatacgccagtcaaagggtatgagcttagatcaggtagcggagcagaccggtgtgagtaaaagcatgcttgctcagatagaaaagggcacagcgaatccatctatcggagtgcttggtaaaatcactagcggtctgcgaattgagtttcaaagacttatagatccgccgagagtggactatgcgctcatatctccggatgatctggtaccgacaaaggagcttttgggacagtacagggtatggacatgcttcccatacgaggactcaagggaggtcgaggtataccgtatcgacgtggagccgggcggcgtgtatacaagcggtgggcacggcgagaaaacacgcgagtatcttacagtcacagacggtgtgctgacggtcgagtgtcacgaccatgtgcaggaaatccataggggacaggtgtataagtttgagaccgatcagcctcatttgtatcgcaatgatggtgatagggtggcaagctgcatgtgcttctttttggattatactaatattcggtgagattttcattggttatcctattgcatatataggtttacctatatataatgatgtatgttgagaaacaaattgttttaaaaagaacattccaggagaacaccatgcaaacattaaagaaattcatcaaatactacaaaccctacaaagcagtctttttcatagacctgctttgcacaacaataattagtgccatagatctggcgtttccgcagctgcttcgcacgctgaccaaaaccctttttgcaggagcaccgggaaaaatcatttctgcgcttattcctattacaataggccttttggtggcatatatcatacagactgcgtgcaggtattatgtgacatatgcggggcacatgatgggagcgaggatggagcgcgacatgagaaaggagcttttcgaccaatatgaaaagctttctttttcgtattatgatcagaataattcaggacagatgatgagcaaactcgtatccgatttgtttgatatatcggagcttgcgcatcacggaccggagaatctttttatatcgcttataaagataatcggttcgttcatttttctgtttatgataaaccgtatgcttgcggttcctatgcttattcttgtggtgcttatgcttgtattttcatatggacagaataagaaaatgcaggaaacctttatggataacaggcgaaaaatcggtgatattaattcgagtcttcaggatactctggcgggcataagggtggtgcagtcatttgccaatgagcgtatcgagcaggaaaaatttaacagaagtaatgaaaatttcctgatttcaaaggatgcaaattacagatgtatgggaagctttatgagcggaaatgcatttttccaggggatgatgtatcttgttacgctggtatttggtggttttttgatagcgcatggaaggatggaggcatccgaccttgctatgtatgcgctgtatataggcatctttatcagtcctatccagatacttgtagagctgactgagatgatgcagaagggactttcgggctttagaagattcttagaggtggtggaaactgagccggatatagttgatgctgctgatgcaaaaccgcttaaaaatgtaaagggaaatgtctgttacgaggatgtttcgttccactatagcgatgatgatacaccggtgctttcgcacgtatcctttgagataccggcaggaaaatcaattgcgcttgttggaccgtcaggaagcggaaagacgacaatatgctcactgcttccgcggttttatgacgtgacggagggcagggtcacaatagatggaaatgatgtgagaaagctcacgcttgagagccttcgctcgcagattggactggtttcgcaggatgtttatctgtttggcggaagtataaaggacaatatagcctatggaaaaccggatgcgacgatggatgagattgtagatgcggcccaaaaggcgaatatacacgattttatcatggagctgccggataaatatgatacgtttgtcggagagagaggcacccgattgtcaggagggcagaagcagaggatttccattgcgagggtgttccttaaaaatccgcctgtgctaatacttgatgaggcaaccagtgcccttgacaatgagagcgagcgctttatccagaaaagtcttgaggagctggcaaaggacagaacgactatcacaattgcccacagactttcgacaatcagaaatgcggacgaaattctcgtggtagctgactgtggcattgctgagagaggcacacatgaggagcttttggcacaggacggaatatatgcgcgctattatgatatgagcaggtaggattaaggaaatttcaactgattaatcataaatgaggggcaaaataccttttgaccatttaatcatgttattatagctgcataaactaactatataggagcagacactatgcaggcaatgttcatagacgtagacggcactttaagcagtccgtgctacaaggtaaacggaaaatttcagataggaatgtcagatgtgcagtgggcagactactgcagtaagcatggtgaggatacatatgagtggtgccgtcctgtgatgcaggtaaaggagtatgccatgaaggcaaaggaaaaaggcacgaagctgtatgtgcttaccacatcaggcacaaaaatcgagacagctgcaaagcgcagatttttagacagatactatgcaggtatgtttgatgacatctatgcggtggagcatgatgatgacaaggtcaggttcattcttaaaaaagcagcagagcttgggattgaaccgtcggactgtgagcttgtggaggatacataccgcatacttttgcagacagtgacggaggggattaaatccactcacatcacaacgattctcacaggcggatgcgaacggtaacccaaaattttccacggtctataaagaaataaaaaaacatccgataaagatgacagcaacaaagcagcacagcttatagttgaggatgactacaaggtgcatttatgtcgaaagttgcgaccgaaaccaattgaatgagagttctatcaaggctataattgaaccagtacagcgatataacttttttcgcagtgctggttcttttcgatgtgccaaaagcgtatagcgaataaaatataatttcagacaggaggacttcaatttggagaaagtacgttacatgatttccgatgcggcagccgccgtggatgtggagactcatgtgttgcgttactgggaggatgagctgggacttgatgtgcccagaaatgaacttggtcacagatactatacgagagataatataaagcagtttttaaggataaaggagctcaaggagaagggctatcagcttcgtgcaatccgcgatatgcttcattcggatgcaccaggtgagccattaaatccaccgaatcctgcagctatggaaaaatccgtgcagcctgtaaattacacgaatatcgcaaatcagacggtgaaacaggagatgtcagggtataagccggcatatcacgatgaactgccgggatacaatcatacatatcgaagccgcacggcagatgagcgtatggatgagtttcgcgagctgatgagcaatatcgtggggagagctatagcacttaacaatgaggagctgagtcagcagatatccactgatgtgcaggagcggatattaaaggaaatgaactatctgatgcgcgaacaggacagcgcgcaggaggagagatataaaaagctggacgctgccatacgcggaaatctgcgtagaaaggggcttttttcaaggaaaaggaatgcggacatgcctgcagatacaaaaataagcgctgcagacaccaagggaaagaaggggcgcgacaagacgcatacgcatgagcttaatccggtgagactgtagagcatgcatgacaacgcttacgctataaaataattactgcaaaaaacgcttacagtataaaaatgattacaatacaaagacgattacaacacaaaaaagacgacccataacaggtcgtctttctttcttacagtatgctaaaaattagccctggctgattgctccagttgggcaaacaccagcacatgtaccacaatcgagacaagaatctgcatcgattacgtactgtgaatcaccagcagagatagctcctactgggcactcaccagcacatgtaccacagctaacgcatgaatcagaaattacgtatgccataatgaaatcctccttataaaataatgatcattattcgccgttattggcttatctgcattgtagtacaaaacacagaataatgcaatgccaaataaaattgtacttacttttacacaatcttatataaaaattactaaatattgagtaaaacttgaaatgctattgttactattgtataatagatagaaaacaattcagaacctccgagaacaaaagctgatacatcatgtttacatgtaagcagcagatgttcctgctttcgaggtggctctgaagtgttacaataaaaacacatgattatttagaaaaactggtgtttgcacatggtatattactgtagtatgtgcggtgaggatataaaatggaaacaaaaattataaaaatagatcaggacaatttagaccataagctcatgcaggaggcaggtgatttgattgcagccggtgagcttgtagcgtttccgacagagacagtgtatgggcttggcggtgatgctttagatccggaggcatcaaagaagatatacagtgcaaaggggcgtccgtcggacaatccgcttattgtacacatatcagatttttcggatttggagcgcatcgcaaagacagtgccggaggatgcaaggaagctttcggatgctttctggccgggacctcttacaatgatagtggagaagggcgatgcagtgccttatgccacaacaggcggcatggacacggtggctgtgcgcatgccgaatcatcctatagcgctagatctcataagaagaagcggctgtcttatcgcggcgccaagcgccaatacatccggcagacctagccctacagaggctgcacatgtggctgaggatctaagcggcaaaatagccatgattatagacggaggaccggttggcataggaatagagtccaccatcattgacctgacagaggatacacctatggtgctgcgcccgggctatatcacaccacagatgctttcaaaggtattaggcaaagaggttatcgtagatccgggaatcatagcggcagatgacacgagaaagccaaaggcacccggcatgaagtacaagcactatgcgccaaaggctgacatggtcatcgtggacggtacgagaaagcatgtgattgcaaagataaatgagcttgtggcttcgcacagggatgatggcaaaaagatagcagtcattgcgacagaggagacaaagcagttttacgatgcagatgttgtcctgtcgatgggaagcagggcggatgaggattcgatagcccatgagctttaccgtatattaagggactgtgatgagctcgatgtggatgtgattttctcggagagcttctccacaccacgtataggacaggccatcatgaaccgtatgctaaaggcggcaggtcatcaggtgatagacacacatgtgaagtatgacaaaatcatttttgtcgcacagaccggcacatgcagggagcagatggcaaagggcatcatgaacgactttgtactcaaggtgccgatggagattgaggcgagaggacttgttgtccagtttccggagccggtcaatcagaaggcagaggcagtgctcataagcaatggaatttccacggagggcatggtgtcaacgcagcttgaggaatcggatatcacggagagtactatggtatttaccatggagtcatcacagcgcgagcgcattatagaaagctttgccgatatcgacccggagcaggtctttgtgctttcacagtatgtgggcgatgagcttgagatactggatccttatggcggcacacttcaaagctacggactgtgctatgaaagcctcagggctacgcttaagaagctggtaaagcgcttaaatgcaaatacataaaagacaaacaaatataacacaatataagacaaaggagaacaaatattatgggtaaggtagtagttatggatcatccgctgattcagcataagattggaattatgagaagaaccgacacaggttcaaaggatttcagaacactcgtcagcgaggttgcgatgcttgagtgctacgaggcaacaagagatctggagcttacagatgtggatattgagactcctatctgtaaggccactgtaaaggaattaaagggcaaaaagcttgcagttgttcctatcttaagagccggacttggtatggtggagggtatgcttgagctcatccctgccgcaaaggttggacacatcggcatgtatcgtgacccggagacagcagagcctatcgagtactattgcaagcttccggcagactgcgcaaacagagaggtatttgtggtggatccgatgctcgcaacaggggggtcagcagtggcagcacttgatatgctcaaaaagcgcggtgtgaaaaacatccactttatgtgcataattgcagctcctgagggagtaaagagactcacagaggcacatcctgatgtggatgtatatataggagcgctcgatgatcatctcaatgagcacaaatatattgtgccgggactcggagatgcaggagacagaattttcggaaccaagtaataaaatgtgtgatagaccatattgaatggaggtgtatatatgggagcttcggaaaagagaaaggattatatctcatgggatgagtattttatgggcatagcgatgctttcaggcatgcgctcgaaggatccgaatacccaggtgggtgcgtgcatagtggacccggagcacaagatactctccatgggctataacggctttcctcttggctgctcagatgatgagttcacctgggccagagagggagaggataacaagtatttctattctacacacagcgagctcaatgccatcttaaactacaggggcggaagccttgagggagcgaccatatatgtcaccctgtttccgtgcaatgagtgcgctaaggcaatcatacagtccggcatcagggaagtagtctacgactgtgacaagtacgagggcactgccagcgtgacagcttcaaagaggatgctgagggcagcgggtgttacaattcgtaggtatgagcacacaggccgtgaggtgacgcttgtgttgtagcacttgtggtgtacacagagacttttgacatgggagcattcgttgtggatagtgataatactgcaattgttatgtcaaattgacgtgatttaacatgaaacgcatgtattttttatgcattttacacataaaaatgtagacaaaagcaataaaaatgatataataatttgtatatgaaaagagataataagaaagaggtaatgaatgcacttatcatggttttccagtttggaatcaacatgattgtgccgatatttctctgcacactggccggtgtgtggattgggaaaaagaccggagcggactgggtaactgttccattgtttttcattggagcgtttgcgggggcaaacaatatataccgtatggttcaaaaattcctgaagtcagaggatgatggcagagccgtcagacagacaccgggcaggcagagtactacggaaacagagaaatcagacagtattagcagggtagagaaggatgttaaaaagaataaatgacgcattgccgggacttgtatttgggatagttttttacgggattgttgtgcagcttattggggtatggtttgtcacagacaaaatttcatattctatcggcttatggtatgggatagcgatagctgttggtatggctgtcaatatcgccacagtcatatatgacgcgaccgccatatatggacaaaaggatgccaatcgcaggatcgtagcaaaatcacttttaaggtatattgttgttgcggtcctgttatttatattgggactatttgattttggaaatctgataatggcctttgtcggtatgctgggactcaagatttcagcgtatttacagcctttatttatgaaggtgacagacagattttccgggagaagtgatgcatcttccgccggcgaaatggagacagagtagcgaaacagcaggtaaacttaataaggaggaggtgataatgtgaatcaggcgattttactggaaagtaacgcagacaatatcgactttatgatccatggtattttttcgataaaggtattcggtcaggaggtctggattaccacatcgcatgcctgtatcctcatagtgatggccattatggtcatattcgctatagtggcaaacaggaagcttaaaaaagcaaaggaagtaccggacggctttcagaatatcatcgagctcatcgtagagatgctcgacaagatggttgagggaaccatgggtaagtgggctccgaggtttgtaaactacatcagcacgatttttatatttatactgatgagtaatatctcaggcttgtttggcttaagaccaccgacagccgactacggaaccacactggcgcttgcacttattacatttttcatgatcagattcaataaggctaagcatcaaagcgcaaaggatatctggaccggtatgtgttcaccactgccgccgtggctgcctatatgggcgccaatcaacattatcagtgagattgcaattcctatctcattatcattgcgtttgttcgccaatgtgttgtcaggaactgttatcatggcgctggtatatggtctgctaaggtttatagccatagcgtggccgtcagtactgcatgtatactttgatttgttctcaggagcaattcagacatatgtattctgtatgctgacaatgacatacgttacacaggcatgtgagacggatgagtaaaactataagatgtatttttaggaggattcaattatggatatcaatggacaggatttaatcagagcatgctcagcaatcggtgcaggtttggcagttatcgccggaatcggacctggtgttggacagggtatcgcagcaggacatggtgcagcagccgtaggacgtaacccgggagcaagaggacagattatgtcaaccatgcttttaggacaggcggttgcagagacaacaggtctttatggtctcgttgttgcattacttttacttttcgttcatccgctcggatagtatattacggtttgccgcagaggattaccgtgcggcgatacagccaacggaaaggagagtaaaagttgttagcacagggatatacatttttgtttaatctggatgcgcagttgctctttgatacagtacttttggcagttgcagtatttttccttttcatgctgatgtcgtatctgcttttcaaccctgcaaggaagctgttaaaggacaggcaggacaggatagaaagcgatataaacacagctgttgccgacaaggaaagtgccgcagcactaaaggcagagtatgagggaaagcttaaggatatcgataaagaggccgaggctattctcacagaggcgagacagaaggcgcttaaaaaccagaacaagattgtggatgatgcaaaggaagaggcttcacgcatcataaagagagccagagaagaggcagagcttgagaagaagcatgccatggatgatatgaagcaggagatgatacagatagcatcgcttatggcacaaaaggctgtcgcagcttcgatcaccacagacattcaggatacactcgttgaagagacacttaaggaaatgggagaatcaacatggctaagctagtatctaaggtatacggtgatgcattgtttgaggctgcccttgaggacaacaggctatccagcctgtctgacgaggtaacagcagtaaaggaaatcattgctgcaaatgatgacctctcaaagctgatggatcatccgcagattgataaagaagaaaaggtcagaatcatcgaagaaatatttgggggaagagtttcagcggagctggtagggcttatgaggatgattatagaaaagaatcactacaaagagcttaccttagttttcgactactttcttgacagagtcaaggagtaccaaaatatcggaacagcatatgtcacatctgcatttgagctttcaaaggagcagaagcttgctgtggagaaacgacttcttgacacgacaaaatacgtgaaatttgagatgcattttgaggtggataccgcgctcataggcggtatgaaaatcagaatcggggacagagtggtggattcatctgtcagcagcagattagaaagactcacccgcgatttgacaaaaatacaattgaaagtaggtgaatgcgctccatgaatctaaagccggaagaaatcagctcagtaataaaggagcagattaaaagatacgcttcccagctcgaagtcgctgatgtaggaacagtcattcaggtggcagacggaatcgcacgtattcatggtcttgagaatgcgatgcagggagagcttttggaatttccaggggaagtatatggaatggtattaaacctcgaggaggacaatgtcggtgctgttttacttggacagcagcgcaatatcaacgagggagatacagttaagaccacaggacgagtggtagaggtgccggtaggcgatgcgatgctcggccgagtagtaaatgcgctcggacagccaatcgacggaaagggacctatccagtcggacaaatatcgtcagatagagagagtagcatcgggagttatctcgagaaagtcagtagatacaccgcttcagaccggtataaaggctattgactcaatggttcctatcggacgaggacaaagagagcttattatcggagacagacagaccggaaagacggctatcgcgatagataccatcatcaaccagaagggacagggtgtgaaatgtatctatgtagccatcggtcagaaggcttctacggttgcatccatagtaaatgagctcgaggagttcggagccatgagctacacgacagtagtggctgcgacagcatcagagcttgcaccgttacagtatatcgcaccatactcaggctgcgctataggcgaggaatggatggaaaacggacaggatgtgctcatagtttacgatgatctgagtaagcatgcagcagcataccgtacgctgtcgctccttttaaagagagcgcctggacgagaggcttatccgggagatgttttctatctccattcaaggcttctggagagagcagcgagactgtcagacaagctgggtggaggctcactcacagcccttcctatcattgagacacaggcgggtgatgtatcggcatatatcccgaccaatgttatctcaatcacagacggtcagatatatctcgagacagagatgttcaacgctggcttcagacctgccataaatgcaggactttcagtttcacgagttggaggctcggcacagataaaggcaatgaaaaagattgcagcacctattcgagtagagctggctcagtacagagagcttgcagcgttctcacagtttggctcagagcttgatgcaagcacagcagagcagctcgcacagggagcacgaatcaaggagattttaaagcagccgcagtacaagccgatgcctgtagagaagcaggttatcataatatacgctgcgacaaagaagtatcttattgatatcaaaatcgaggatattttaagatttgaggcagagctgtttgatttcattgataccagatatcctgagattcctgaagcaatcagggagaaaaaggtgatggacgatgatacggagcaggcacttataaaggcaatcgaggaatgcaaaaagcagttccgttagacggttggatattagtagaaggcaggtggtaaaatggcttcgatgcgagacataaagcgcagaaaaagcagtattacaagtactcagcagatcacaaaggccatgaagctcgtttctaccgtcaagctgcaaaaggcgagagcacatgcggaggcaacagatccgtatttcaactatatgtacaggacagtaagctcgatgcttgcaaagagcggcaatctggagcacccatacttaaaggccggtgattcgccaaggaaggcggtagtcgttttgacatcaaaccgcggactggcaggcggatacaacagcaatatagtaaagctcatcacacacggagacttcaaaaaagaagagctcgacatatacgctgtgggagcaaagggtgaggagctgcttacgtcaaagggctatcatatagtcgagagtgcaccggagatgatggaggacccgacctacgaggatgcggcggcactttgcaaaagagtgttaaaggcatttacagacggtcaggtgggggagatttatctcgcatatacccatttcaaaaacacagttacacaggaggcgaagctcataaagctattgccggtggagctggatgagagcggggcagatgagaaagaggactccaatattctcatgaattttgaaccgaatccggaggaggctttggagcttattattccaaaatatgtgacaagcctgttttacggagcactggtggagtcatttgccagtgaaaacggagccagaatgcaggcgatggattctgctacgagcaatgcagaggatatgatcagtgatctgacattgaaatataacagagcgcgtcagggctcaatcacgcaggagcttactgagataattgcaggagctaatgcgatagagtgatacatgcatatccggtcatgggaaggcaggcatgtgtgtctgtgaatggccaaaaaggcgagtgtatcatatgaattaaaaaagaaggagaaactataaatggcagataaaaatgtaggtaaaatcatacaggttatcagtgccgttctggatatcaagttttcagagggtaatctgcctgagataaacgatgcagtcgaggtgccgctgaaaaacggcggaaagctggtcgttgaggttgcacagcatctgggcgacgatacagtcagatgtatcgccatgggacctactgatggtctcgtccgcggcatggacgctatcgcaacaggagcacctatttctgtgccggtgggggagaatacacttggaagaatgttcaatgtgctcggagagcctatcgatgaggttgagcctccacagacagaggagaaatgggcaatccacagacctgcgcctagctttgaggagcaggctacatcgcaggagatgcttgagacaggaataaaggttgtagatttgctctgcccataccagaagggtggaaaaatcggactcttcggaggtgccggagtaggaaaaacggtgctcatccaggagcttatccacaacatcgctacacagcatggtggatactcagtatttaccggtgtaggagagcgtacacgagagggaaatgacctgtactacgagatgaaggagtcaggtgttatcgacaagaccaccatggtgttcggacagatgaacgagccacccggagcacgtatgagagttgccctggcaggacttacaatggcagagtatttccgtgacagaggcggcaaggatgtgcttctctttgtggacaatatcttccgtttcacacaggcaggttcagaggtatcagcacttttaggacgtatgccttcagccgttggctaccagccgacactgcagacagagatgggagctcttcaggagcgtatcacatcaacaaagaacggttcaatcacatcggttcaggccgtatatgtgcctgcagatgaccttacagacccggcaccggcgactaccttcgcacacctcgatgccacgacagtacttgagcgttctatcgcagagcttggtatttatccggctgtagacccgctggcatccacatcgcgtatccttgatccgcgtatcgtgggacaggagcattttgaggtggcacacgctgtccaggagatactccagaagtataaggagctgcaggatatcatcgcaatcctcggtatggatgagctctcagaggaggataagctcgtagtaagccgtgcacgtaaggtgcagcgtttcctgtcacagccgttcttcgtagcaggacagtttaccggactcgagggcaaatatgtgcctatcgccgagaccatcagaggatttaaggagatactcgaaggaaagcatgatgatgtaccggagagctatttcttaaacgttggaagcatagatgaagtccgtgccaagatgcagtaatgtgaggtgatttcatggcagataacatttttgacatagaaataatcacaccggacagggtgttctacaagggagagacagacttcctcgagttcaatacccaaaacggagagattggtgtatacaaaaaccatataccgctcacgacagtgcttgcaccgggaatcgtgactatccataatggcgatgaggagaaaatagccgcaatccattcaggctttgcggaaatacttggagacaaggtcacatttcttgcagagcttgcagagtggcctgatgagatagacatagaccgcgcacaggccgcaaaggagcgggcagagcagcgcctttcaaatcacacagcagagattgatgtgaagagagcagagtttgcactcaggaaggcacttatcagaatagatgtggcacatcatatgtaattataaaatcccggaatctgcaggtaagcggatttccgggatttttaattttttataagaagacggtaaagcatttttctctttccaatccggctgataggcatagtttccccgaaagatatgatattctttcggggaaactttttagaaaattatttttttatgtaaaaaatgaaacatggtcatgtcctgacacggtgggatttgcggaactgctgtggcgattcatgaaaatttttctggaaggactgcgaaaaatagctggtagaggaaaacccgatacatccggcaatctcttcgatgctgtgattggttgtgagcagcaggtcacgcgcagacgccagccgaacttcgttcaggtaagcgatgggagatttcccgtacagctctgtaaaacggtgtgaaaggtaatattttgagagactgcagttttcggcaagcgaatccagagagatcatgctctggtaattgtgctcgataaagcgttttaccttgtggcattcgtggctgctgttctgcgcatccaccacttcataggatacatggtctttccggcagaaatataaaattaaaatatccagataatgctggcagatctctgcgtagcggtcctgtttgttatgcatttcccgcaggatattttcaaaacactggcggataaaaggcgagtttgcagaagccgggacatgaatgtattccggttctttgtcagtattcagttttaatccttccaccccgagcacataataatccagtggattttccggatcggaaaactctgtgtgtgttacctgtgcaccgatcacgacaaggctgtttgaggagacaggaagagattcattttcaatcagcatgcgtccggtgccgtctttaataaagaagatttccgtaaaatgatggctgtggggaaacgaagtccagtcattttcaaatttggatgctgatatggaaagcaggcggaaatggatttccggctgtacctcattatccagattaaatttgcggttactcatggaaaatacactcctttcatgtcataattgcaatgatttcctagttaaaatggaacgatgttgtaataagtatacaatgaaaaaaacaaaataacaagatttttaaaataaagcaagaattataaaatataaagcaatatatggataggaaaaagagatggcgtactctataataacaaatgtaaggaagaaaacataagtatttatagtaaaaaaaacaaaaatgggagattacatgttaaactccgtatttgttacagctttggcacttgtaattcttttaattgttgcactgtcggcagcttactgtttgtcacgttttaaatttaaaggcagcaaatttttaaatgcggcttttatgggtggtctttttattaacgtgaattatattgttgttccaatttttttgatgctgcgagatggggacaattggctgaaatcagtaattgggaaaagttttctgttaaataatctggtcatacttgcaatcgtatatgctgcgacagcacttccgtttacaatttatctgttgtcagggtatttttcaacattggcacatgattatgaagaggcggcatatattgatggagcaggttatagtacaacgatgtggaaaattattttcccaatggcaaaaccatctattattacagtaatcttgtttaattttctttctttttggaatgactgttggtggtttaaagggttgatgagaagggagattaaaatggaatttgggaaaaagcacacaaaatgcagaataattttaatggcagctctttttattgccggaataagcctgtctgtatttagatggggtatgacaggaaaaataacaggtttaggaattatgcttattggaattatctgtttattaatggcattgtggatttataattgcccttttgcagaaaagaagaaaagaatgtaattatatggatgaaatagagtgaggaagaaaaatgagtgagaaaaatacaggccgtgtcacaattcctacaaatctggacgttgttccagaaacaattgaattaatgaagcgctggggtgcggatgcaatccgcgactgtgacggaacagaattcccggaagagctgacaaagaccggggcaaagatttatgcaacttactacaccacgagaaaagataatgagtgggcgaaggcaaacccggatgaggtgcagcagtgttatattatgagtggattttatacggctgttgaaagcgaactgcaaattcctctgatgaaggggatttcggaggagttaatgcaggtcaatacaagagatgatattaaacgatggtgggaagtcattgaccgttccacaggtcaggtggtatcgacagcgcagtgggaatacaacggggagtcagggtgtgtctgtattcatgaggcagaaccatttcatgaatatactgtaagctttctggcgtacattatctgggatccggtacatatgtataatgcagtgacaaatgactggaaggattttgaacatcagattacatttgacgtaagacagccgaaaacacataaatattccatggagcgtctgcgcaagttctgcgcagagcatccatatgtcaatgtcatccgctatacgacgtttttccaccagtttacattaatgttcgacgaattaaagagggagaaatatgtggactggtatggttattccgcatcagtaagcccttatattttagaacagtttgaaaaagaagctggctataaattccgcccggaatatattatcgatcagggatattataataaccagtaccgtgtgccgagcaaagaatataaggattttctggcattccagcgcagggaagttgcaaagcttgcaaaagagatggttgacatcacacatgaatgcggcaaagaggcaatgatgtttttgggggatcactggatcggaacagaaccattcatggaagagtttgcaacgatcggtcttgacgcagtggtaggaagcgttggaaacggaagtacacttcgtctgatctctgatattgaaggtgtaaaatatacagaaggaagattccttccatactttttcccggataccttccatgagggcggagatcctgtcaaggaagcaaaggaaaactgggtgacagcacgccgtgccatcttaagaaaaccaatcgaccgtatcggatatggcggatatttaaagcttgcattagatttcccggagtttttggactatgtggagagcgtgtgcaatgaattccgtgaactgtatgagaatgcaaaaggaacaacaccgtactgtgtgaagaaggttgctgttttaaatagttggggcaaaatccgaagctggggctgtcatatggtacaccatgctctatatcagaaacagaattacagttatgcgggaattatcgaggcattaagcggagcaccgtttgatgtaaaatttatttcctttgatgatattttaaaagataagaacatattaaaggatattgatgtcattatcaatgtcggggacggggatacggcacacactggaggggcagtctgggagaacccggttatttccgcagccattcgtgaatttgtttatcagggtggaggctttatcggtgttggggaaccggcaggacaccagtatcagggacattatctgcagcttgccgatttaattggtgtggaaaaagaaaccggatttaccttaaattacgacaagtataactgggaagaacacaaaaatcattttattctcgcggatacgacaaagccggtcgacttcggagagggcaagaagaacatgtttgcctatgagggaacagaaattcttgtgcagagggataaagaggtgcagatggcagtcaatgaatttggcgagggccgctcggtttatatcagcggactgccttatagttttgagaacagcagaattctttatcggagtattttgtggagtacacatggcgaaagtttattacatcagtggtttagtacaaatttcaatgtggaagtacatgcatatgtaaaaaatggcaaattctgtgttgtaaataatacctacgagccacagaatacggttatctatcgcggagatggaagcagttttgcgttgaaaatggaggcaaatgagattaaatggtacgctgtttaatcaggagatataaagagagaatgcggaagattttcataatgtcatagggaatcgtatagaaaagattatgaaagtaagatatgcatttcagaagctggaaaatctgccggagggatttgaagttccggccggaagagtaaagccatggggaactgcgcatgcaattttaagctgtaaagatatgattgacggaccatttgcagtgattaatgcagacgactattatggaagagaagcatttaagcagatttatgattatctgagtgtgcatgaagataatgaaaagtatcagtatgcaatggtagggtatcagttgaaaaatactttgacggagaatggaagtgtggcaagaggtgtttgtgatattgatagtaatggaaaacttgtcagtgtaacagaacatacaacgattgtaaaacgtggagataatgctgcatatacggaagatgatggaaaaagttatacggatttggcaggagatacgattgtttccatgaatttatggggatttagcaagggatttttgtcagagattgcgtatggatttcgtgattttctgcaggagggtctgcaacataatccactgaaatgtgaatattatcttccgtcggtcgtcagcagactgttagatagcaataaagcagaagtaaaagttcttcttacaacagaaaagtggtatggagttacctacagggaagataaaccaatggttatggcagcattgaaaaagctggaagagaataatttttatccaaaacagctctgcggaaaattagaagcggctgcaaacttctgttttgaaggtgtatataaagaagaaattccatggggaaatggacatattaatgatacttaccgtgttacatttgaaaatgaacaaggagtaaaaaagcattatattttacagcagatgaacaagagtatctttaaaaacccggttgaattaatggaaaataccgtaagctatgatttgatagataatcctgaaatactttatgagggcggtctggcatttggcagattacaaagtatgttagcggattatccggcgaaaacacttcatgagacaattccgggatttcatgataccagagaaagatttgagacattcaaaaaggcagtggaagaggatgtgtgattgacctggacactgtaatgccgggggcggccatgaatgattttggagatgcagtgcggattggagcaagtacagcattagaggatgaacaaaatctggataaagtgtggtgcgatttagagctttttgaagcatgtgcgaagggctttattgagggctgtggtggaaaactttcacaggaagagataaagctgcttccgatgggcgctaggcttatgacctatgaatgtggaatgaggtttcttatggattatattcagggagacatttattttaaaattcacagaccggggcagaatttggaccgggcaaggacacagtttaaacttgtctctgatatggaacataagtggaaagtaatggagaatattgtgaagaagtatatgtaagacaaaacagtggcattgacaatttccaatgcaatcaaggcgtcagttccggaaataccggactgacgccttgattgcattaaacgtttgtatttgattcttcttcgccccagaaaattggaatatatgatataatagctacgttgtcgcacccaatctggcaacagaaagggggtgtgctgcttggatttgataatttctttcttagctaccgccattatagcatatgcaagttgccttttcaagatacacttttttattatttttggcatataaaccgtgaactattttttcatttttcataatagtatcattatggtataatagaaacattaaaatcgttaaggaaagaatcgaaggtggtgcaaacgaaaaagcagtattgagacttttcattaactgccctttcgtttgcatcaatttcgattttttctggttgaacaaagcgcgtcaactttatatggacttttaattctgacactctatttataataagatagcgtgtacacatagaaacacatagaatttataattcagaattaaatattgagttttatggttatttatactataataatataaaaatacaattattttttattaataatcacaatatttatccataggaggaatgagccatgatagaaattatttgtggagacaaaggcaagggcaagacaaaagagctgttagacaaggtaaattcatcaattaagggaaatgaaggttccatagtttttcttgataagagccagaagcacatgtatgagcttaataatcaggttcgactaatcaatgttatggactatcctattgacaattgtgatgaatttttaggatttatatgcggaatcatatcgcaggatcatgatctggaggagatgtatttagacagcttccttacaattgcatcacttgatgatgagggggatatcaccaaggcaatcgaaaagcttgatataatcagcgagaagtttaaggtgaagttcatcttaagtgtttcaaggaatattgacaagttgcctgaatgtgccaaggcaaaggttatcatttctttataaatgattaattatggggatgtgtatttcacatcccttttttaaggagtaaaattgtgtcccgaaagaataaaaaagtactgaaatatcacaccggcttcaatctgaatatcggttttatagtgttttttgtaataataatctatgtgatttttcacatatttacgtatttcacctcaaacccggtatctgaatacgaggtacaacagggtactatagcgaccaacaacatatataagggcatgataatccgcgaggaaagtgtagtgtatgctgaggaatcaggaaacctcaactactttgtgtcaaacggctcaaaggttgcaacaagtgatgttgtctactctgttgatacagacggctccattgcaacccagattaccggtgctcaaaatgatgcttccgccatcactgacgaggctgccgggcagattatcactgacataaacagcttttcatccggctacaacagacgatacttttcaaaggtttatacattcaaaaacgatctgtctgcacagctgacacaggttctcagtcaaaatgcactgacaagcctggcagatactatcagtactgctgaggctaacaacaccttctatacatataagccgacagctcccggaatagtctattacgggatagacggctatgaggatgtcactacagacagcttcactctggatcagtacaacaacactaattatgaagagactgatttaaccgacaacagcaccatcaatcagctggatcctgtttataagctgattacaagtgagaactggaatatactcataaatgttcctgataatgttgccaagagcctgaatgacaagtcagtcataaaaatcagattctgcgatgatgactatacaaccacggtatcgttcagccttttgaagaaggatgatgcttttttcctgaagctgaatatgaaaaactcactcatccgctatataaatgagcgttttaccaatatagagctcgtgcttggaacagacacagggcttaaaatacctaattcagctataaccaaaaaggaatttttcactatcccaaaggattatttcactgcaagcggcgattccgatgattcgtcactcatgataaaggataaaagcagtggctcagttactatagtcagtccaacaatattcagccagaatgatgacttttatttcgtagatgatgaatatcttaaggacggcgatatcattgtcaagcctgattcttcgtcaacctacagggttggaacagataaggacaagctcacaggtgtctacaatatcaacaaaggatacgctgtgtttaagcagataaaggtacttgcatcaaacgatgactacacaattgtagaagccaaaacgccatatggcatttcgctttatgaccatatagccttggatggcaaatccgtgaaggaaaaccagaccataaccaaataattattgtgataaatattattgaaaatatacagaaaggacagattttatgttaaaagacaacttacatcaggttcagcaaaatataaaggccgcatgtgacagagctcacaggaactatagtgatgtcacactaattgcagtcagcaaaaccaaacctgttgagatgctcagtgagatatacgatgagggcatccgtgagttcggcgagaataaggtacaggaaatgtgtgaaaagatggaggttatgccaaaagatattcactggcacatgattgggcatcttcagaccaacaaggtgaagtatatagttggaaaaacatcacttattcactctgtagattcactgcatctggcaaaggagatacaaaagcaggccataaagcatgactgcagctgcgacatactggttgaggtcaatatagcaggagaggaatctaagtttggcacatcacgagatgaggctatctccttagttgaagaaattgctaaactggaccatatccatataaaaggacttatgactatagcaccatttgtagatgatcctgaggataacagacaatactttagagatattaagcaattatcagttgacatagcacagaaaaacatagataatgtcagtatgaatgttctgtccatgggtatgacaggagattacacagtagcaatagaagagggcgcaacaatggtacgtgtcggtaccggaatatttggagagcgcgactacagcaatgctaactgatacttttcatatgctatacacaaaataaaaatagaaaaggaatatagaaatgagtttcatagataagattcttgacaaaatgagtttgaattctgaggacgatgaggagttcgataacgaggattattacctcgatgatgaggaagaagaagagcttccaagaaatcctttccgtagaaaaaaagaggctgttgaagaggaaacggccataaaaagcacaaggcgtgatacaacaccaaaggagaagcctgttaagactacatccaagattacaccaatatcaaaatcatccagaaagcaggtagcatcagacatggaagtttgcgtaataaaaccaagttcaattgaagacgaaatagaaataacagacacattacttaacggacgtacagtcgtcatcaacatggagggacttaatgtcgatgtggcacagcgcatcatagatttcacatcaggctcagcatatgccctgcacggtaatctgcagaagatatccaactttatcttcatcgccacaccacacggagtagatatctcaggagatatccagagtctcatggattcatttgatctcccgggttcatcttattaagcggagtctctaatcagctatgaagaaaaataaaacaaaaaaacagatgtgtacagcaggcatcattgcattgattcttgtagcaattgaccagcttacaaagtatctggctgttataaatctaaagcaatcatccacgggtgtatttgttctcattccgggagttttcgagttcagatacctggaaaaccagagtgctgcatttggtgttgatctgctttcaataatacagaatatctttcattttacatattggtctgagaatccattggcatttttgcgtgccaaaatgatttttttctcagtgattaccattgcagttgttatacttttgtgtgtatggtatcgcaaaatacctgtctcaaaacgttttagactgctgaatgttgttgtaatactgtttgttgcaggtgcactcggcaatctgatagaccgtattgtaaataactatgtggttgatttcttttattttagcctgattaattttccgatattcaatgtagctgatatatatgtcactgtagcggcatttatgtttatcatactcgggctgttttactacaaggaggaggatttttccttaatcttccctgacaaaaagcatgaaaatagataaagaaaataaacaaaaaaagagaaagcttcactatgaatagagatacatttgaagtccagagtgaacaggagggagaacgactggataaatacctaagcagcatttatccggatatttctcgctccttttttcaacggatactaaaagaaaatcaaatactggtcaatgataagccccagaaagcaaattacaggctaaagactgatgacatagtagatgtcacaattcctgatgccgtacagacacctattctgccacaggatattccgcttgacatactctacgaggatgatgacgtactggtagtcaacaagccaaagggcatggttgtacacccatcagccgggcattacagcgatactcttgtaaatgccataatgtaccactgcaaggactctttaagtggtataaacggcgaaatacggcccggtatagtacatcgcatagatatggacaccaccggctcccttattgtctgcaagaacgatgaaagccatataaagatatcagaacagataaaggaccatagctgcaaccgtatatacgtgggcattgtctgtggcaatgtaaaggatgacgagggcaccatagagggcgccataggcagaaatcccaatgaccgcaagaaaatggcgatcaatgagaaaaacggaaagccggctgtcacacattataaggtgcttgaacgctttggtgactacacatatatgcagtttaagcttgagaccggcaggacacaccagatacgcgtgcatatggcaagtattaatcatcccttgcttggagatatgctgtattccagctattccccgacgaaaaaccgcttcaaaggccttgaaggacagtgcctgcatgcaaaaacaatagggtttgtgcacccaaaaaccggtgaatacatggaatttgatgcacctttaccaaaatactttgccaatttgcttgaagtgttatataatataaataacaaataaattgaattatcacatagtgatatagtattaattatttatataagggggtctgaattatgggatcaaacgaaatttacacaataggaagagaatttggaagcctcggaaaacaggtcggacaagaattagctaaaagacttggaattaaattttatgataaagagctcttacagaaggcagctaaggaatcaggactttgcgaggaaatatttgagtcgcatgacgaaaagcctacaaacagctttttatattcgctggtcatggacacctacacaggtggctcttattccacagcaccatttcttgatatgcctctgaatcacaaggtatttttagcacagtttgatgctatcaaaaagattgcggcaaatgaatcctgtgttattgtaggccgctgtgcagattatgctttagcagacgagccgcattgtctcaatatcttcatacgttccaacatggacgacagaattaaaagaataagtgaaagactcaatgtcccggagaacaaggctaaagacataattaagaaaaaagataaagagcgctcaagctattacaattactacaccagtaaaaaatggggagacgcaagaagctatgatttgtgcctgaacacaagccagatatcagttgaggactcaatcgagcttatacttaaatacagggaatgcatgagaaatcacaataaataattgcataataaataattgtattgttgtatagaaaaactatagatataaagccatcggagctgatacaaatagaggttccggtggcttattcttgtaccataatgctttttgcaaggtcatttattcgttaaacttagatttagcgaataaatatgtaccgctaaaattagtactgctccgctattttatattattaaacacaaaaagacggttgaaaaatcaatcgtctttttatatctagaatttatgattttattatgaaatagataacacatcctccacaatctgctctgcagtcagatgattctccttcagtacagcatccacatcatacctgtcaagaaattccttcttcaatccataattcatcactttcatattgcttgcaccatagaatcgtgcgattttttcaccaaagccgccatctaaaataccatcctccaaagtaataacagtatcatgattttgcttaagcttagtcaaaagcgcctcatccaatccggtgatgtaatacggattgattacagttgcattgattttggcttcttctttaagaagcttcgcagcctcctttgccagttcaaagaaggttcccagaccgataatcgcaatcttttctcctgtctgagccacctcatatctgttgagtctgccaaaatcctttgtcacacttgaaccatctgaaatcatcggtccgcccggcagctttattgcaaccggataagatgtctgctccatactccagtcgagcatggccagatactcttcctttgttgccggtgccagatataccagatttggaatatttgaaagcatcggaatatcctgaaagcctaagtgtgtaacgtcattcattccatatacggaaccctgatatattaccattgtaatcggactgttattgatgcagacatcctgcgatacctggtcaaaggttctctgtacaaacgaactgtatacaccataaaatggtttaccaccatttacagcaattccggatgccagtgccactgcagtctcctctgcaatacctacatcgacaaactgactgccagcttcttttctcttatcctctgtaaagcccataacagtcggtgtaccggaagtaattgcaacaacagaagaatcatttttcatcttttcaagcagatattcacaggtcacagaagaataatcctcttccacattgtcaaatagcggctttcctgtttctatatcaaatggaccgctgtaatgccactgctccttgcatttttctgcaggggcataacccttgcccttaagtgtgtttatatgcactacaaccggtttagtgctgtccttgacctctttaaatgccttaataagagctgcaacatcgttgcccctgtccacatacacatagtcaagtcccatagccttaaacagattgcattctgcctgaccgtcagtctttcgaagcagagctagattctgatatagacctccatgattttcagcaatcgacatatcgttgtcatttactataataataaaattgctttgaagctcagcagcaaaatcaagtccctcaagtgcttctcctccgcttaatgagccgtctccgatgacagcaatcacattgccgttttcaccctttaagtcccttgcctttgcaagacctgcagccagactgaccgacgttgatgtatgtccgactgtaaaaaaatcatgctcgctctcgtttggatttgtatagcctgacacatcatcatagtgctgttcagacaaatacgcttccttacgccccgtaagcatcttatgaggataactctggtgcgatacatcataaacaatcttgtccttaggtgattcaaatacataatgtaaagcgattgtcgcctctaccattccaaaattcggtccaaaatgtccgccatgcttacttgctcttaccaaaagggcatctcttatctcctgcgccagcaccggcagttcatctatcttaattttctttacatcttctggtccgttaattttctcaagatacatattatattttgtcctcctatttgtcccaggtcaattcacctgtctttatcgcattctcgtatttagaaattttatactgtaagcgttccatcgtgttttcaatctgttttttctgctcatcaagctgctcgtattgctccttgagaagctgacacctcgcttcaaatgtagcatctcccatctgaaaaagcctgatatattcaataagtgcctcaatcggcactccggcattacgcatacatatagtgtgctccacccagctgatatctgattcggtataatcgcgtatacctcctgaagtccgcgcaaccggtggaatcaggcctatgcgttcataatacctgagtgtatcagtagacacaccaaaacgctcactcacttccttgatagtcactcacatcgcctcctttttgattgttacaatgaaactatatcactttgagtccactccaagtcaagagcttttcatctgttttgtatacataagaaaattatcgtgttataatctcaataataaaatttaaaaagatttacacttggaggaaaaatatgaactatacagaatgtatcgaaaatgccagaccacgtcttggaaaatactgcaaggcctgtcctgaatgcaacggccgcgcatgcaaaaaccagatgcccggtcccggctcaaagggcatcggagacacagccatacgcaactacgacaaatggaaacaaatccgtgtaaacatggatactattgccgaaaataagcctgtagacacctctctcacactcttcggccgtacttttaaatatccggtatttgcaggtcctgtcggtgcggtacagctacactacggagactgtctggatgatgtgacatacaacgatatccttgtgtcagcctgtgcaaagaacggtatcgcagctttcacaggcgacggaactgaccccaatgtcatggttgcagccaccaaggctatcaaaaatgcagatggtgcaggaatacctaccgtaaagccatggaacattgagaccatacgtgagaaaatgaagctggtacatgaatcaggcgcatttgcagtagctatggatatcgatgcagccggtcttccgttcctcaaaaatcttgatccgccagccggaagcaaaacagtttcagagctttgcgatatcatacagatggccggaaccccgtttattataaaggggattatgactgtaaagggtgcgcttaaagcaaaagaagcaggcgcaagcgctattattgtatcaaatcacggtggacgtgtgctggatcagtgtcctgccactgctgaggtgcttgaaagcatcgtaaaggctcttgaaggctcaggcattaagatccttgtagatggtggcatcagaagcggcacagacgtctttaaagcccttgcactgggtgcagacggagttcttatcgcaagaccgtttgtaacggctgtatacggcggtaaggccgatggtgtacgtgcatacatagacaaaatcggtacagagcttgaagacaccatgaagatgtgtggtgtatcttcgcttgatgaaatcacaagggactgtgtgatgaccttctagtttaaaaacatgcttcatgacttttcgtttttatataaattcttcatacaaaagcaccataaccggcatcgtcactacagcacaaagcgttgtcactacatttattgcgctggcataccttgaatcattgccatacacctgacacatctgtgtaacagtcgatgccgaaggcgtaataaccgccaagaaaacaataagcataatctttggcgcatctgcagaaagatatgccatatggctgattttaataagaataagcgatatcaacggaaccagaagcatcctgagaaaggtaacaaaatacacccttctgttggcaaaaaccttcttcaaatccatccctgcaaaaagcatgcctgtcacaatcatgctggcaggtccaatcatactgccgacagaaccgattgtgtcattgataagctgcggcagatgaatccttgtaaagaaaagcaccacacctattactatggaaatcatattgatattaaggacaatctttcgccagtcataggagttttcacggcttataatctttttgcagtgggtccacaaaaataccagctgcacactcatgaaagcacagccgtaaagcacccactcctgccccagtataaatgtcacaatcggaacaatcagattgcctgaatttgaataataaactgatgcgacctccacctcattcatatggaaaagcctgcccataacagaaatgataaacagcaaaactaactgcaaaatcaccgatgccgcaaatgcaatcaaaagacctctcactgtttttgaagtgtaattcacctgaaaggcattgataataacacacggtataatcagatacagcacaatctttgataaaaccttgctgtcatcatccttcacaatacctgttttcacaataataaaacccatgaaaatcatgataaaaagctctattatctgttccattaaaagtatactgatatgcataaaaatcatctcctgctctaaatatctatgtcttaaaaggcatgcatatctaattcataatttataaatctataatctcgtagtccactttgaacaatcccacacatccgtcgcaagcccatcataaaaatccggctcatggcataccataagtatgcttcccttgtactcctttaaggcacgcttcagctcatccttagcatccacatccagatggtttgtaggctcatccagaagcagaatatttgtctctctgtttatcagcttgcacaggcgtacctttgcctgctcaccaccgcttaacacacgcacctggctttcaatatgctttgtggtcaggccacacttggcaagcgcgcttcgcacctcgtactgcgaaaatgcaggaaactcgttccatatctcctcaatacatgtggttgtaaccgactgatccatctcctgctcaaaatacccaatttccagataatctccaagtgtaacacttcctgaaagcggctttatcagaccaagaatactcttaagcagggttgtcttaccgatgccgtttgcaccggtaagaacaatcttttgtcctctttccatctcaaggtcgagagcagatgaaagcggatcatcatagccaatgaccagaccatttgtctggaagatataccgccccggagtacgcgctgtcttaaagttaaactccggctttggcttttcagcagcaagctcaataacatccatcttgtcaagcttcttctgacgtgacattgccatattccttgtagcgacacgtgccttatttctagccacaaaatccttcagctctttaatctcctgctgctgtttgttgtacgcagcctcaagctgggctttcttcatctcatagacttccataaatttgtcataatccccgacatacctgtcgagcttcttgttgtccatgtgatagatgagatttaccacgctgttcagaaacggtatgtcgtgcgaaatgagaataaacgcattctcataatcattaagatatcgcttaagccactcaatatgctctacgtccagatagtttgtaggctcatccaaaagcagaatatccggcttctccaagaggagctttcccatcagcactttggttctctgaccaccgcttaaatcggtaacgtctttatcaagccccaggtctaaaagtccaagagcccttgcaacctcctcaacctttgcatcgatcatatagaaatcatgcatggtaagcatgtcctgaatcgtgccggcttcctccatcagcttattcatctcgtcctcgtccacatcgccaagacgcgcatatatgtcattcatctcattttccatatcataaaggaaatcaaatgcagaggaaagaacggagccgatagtcatacccttttcaagcgctgtgtgctggtcgagataacccacacgcaccttcttggcccactctattttgccctcatcaggcataagcctgcctgtgataatattcataaaagtcgattttccctcaccgtttgcaccgacaagccctatgtgctcgcccttcaacagtctaaaggaaacatcctcaaaaatagcacggtcgccaaaaccatggcttaggtgctctacgtttaaaatactcatttatacctctcttcaagattttattttcccaatatggcactttcttcaagatttagtcagcaagctcatattgttttgccagtctgttaagctcatcatgaacctctttcaccagattctccgggcctattatcttaaaattatcccccataaccataatccaatgaataaaaagcttgttatcagctaccttcacaaaaacacgcgaatgagcttcatcattctttaagattgtcacatcggttccaaacctgtcaatcaggacacctatagcgctgtttttgcacagtatctcagccttaatctcttctccattatacataccaaacttcgatttgccataagaagcaatatcgagttttttaagcttctccctgccctcacgggctttattttcaatcaggatattcttcatcttgtctacacggtaatgatgaatctcctttacctgtgtatcatggtcatatccaatcagatagtaattgccatcattccacagcaatccccatggactgacatgatatctggcgccgtcatgcttcacctcaagctcttttttcgtattccaccggcaatattgaaaagaaaggcttgaattatttgcaattgcattgtgtatggtatcgacatttttcatgatgtcgctgttcatggttttcactcttccggcaacatatacctgacgctgcagagtggcagcctcctatctgcttgtaagactctccagcttcttaataagctcattggatttctcctcagtgatgaacttggcagccgcgacagaatccaccaaaagcttaagctccgccagctcaaatgccctgcctatcaccttataatggacagtcctgccatactgcgtcttttgggttttgataccaaaatcattcagctgtgctatatcatcatacagactttttctcgcggccgtgacatcgtatgtatgcagcttatttaaaatctcatcaagcgtaatgtcatgattggcatccgtattattaaaaagaattttcgccagatacaaaagctttagcttttgattgctcctaggttccttagattgcttcccggcagtcagctcattgttttccgcttcactcatatacacttatctccccatcaatttgtattgtaactattcagaaacacacgcacattcgcaaaaccgcacgatactcgtcacttgattattgcagcaagtttttcgccacacatcacaccgagtatacatcctaaacagctcaacaacacatatccgcacccaagcaggcagtgattatgttcaaacagattataggattccagcgaaaatgtagaaaacgtggtaaagccaccgcatacaccggttttccaaaacaaaaccatattcttggatactccatcccttgcacttgtgattccgacaataaatccaatcagaattgccccaattatattggtgattaaagtcaaaaaaggaaactcagtttttaaaggtataaggctgatggcatatctggccattgcacctacggcgccacccaatgccacaaataaaaaattcatggtggttatctcctatatgtaaaatacgcgattctcttttctcggaatcacgtcaggataatctccatcaacatatccaagagcacaatgtccgattccctcatactcatcctcaataccgagtgatttgagaagcttcttgccccagtcagactcaaactcttccttcgcgcggtgaatccagcagcttccaatacccagatcatgcgctgcaagcatgagattacccatcacaagactgccatcatagacatgtgtaggccagtccttctttccaagaacgataagaataaccggcgcaccgtaaaatggatcagtattacttcccattatatcggcatttctcttagcaatttcatcccttatttccttgtttgtcacctgaataatgatggtgttctgtgcacctctgccgtttgccgcaaaggttccggcctcaattatccggtcaaggatgtcctgcggaatcatgtccggtttgaatttgcgaatacttcttctggttttcatttcttctaatactttgctcatgattttgatcctcctattaattcaaaaatttataatctctctagcatcataaaaagccgaaccgacagcgcctattgcagccttttgattaatttcagtagatataattgcataatacatatttgttcacccgttttaagtattatgcagtaattaagcataatttgcaagtatgcataaatactgcatatgttattattaggcatccatatcgtataattgtcaaatcagattttttatctcattaaacacttttaaatatccgtttgaaatgatatttacaacaattcctttagcttcaacatctcatcctcagacaacgtaacacccttacccattttctcgtgatccggtgcccagtctctgatatcatactttggttctccaccattccatgaaattctgttgagttccttggtccatcctttggcactctctgagaggttgcctatgtgttctactatttcgtatttaaaatctgccatatctataaatcctccttattagaatcaacaacaccaaacttatttacaaaatcctcatagccatttacccaatcaaactttgtatcatcagatactgctttaaaatgaagttctccacaatgaatcttgttcttttccacatcagtcaggtcagcccatgtcttacctgcttttgtttcaacgatgaaatatattccgattgatgggtctttcaaagcctccctacgacatactaccgcccagtcagggctatagttaccatatggtgtatctattacaaatccaccctttttcagctttgtgaaaagtaaaacattctcattattctccagcttatgggcaaattttgactcaccttcactatcaagcttgtaatattcattcatcgcagaacttctgtcagattttgctttgaacactctccattcctgctcgaaatctgcctctgtaatggtatcaagctcaaagatatttcgctcatctaattcatatccgtttatcacttcataagaagtaatattggaagcctttgtatcattaagaattcctttgattaactgagtcacttcatccaaaatatcctgattattaagcaactctcgtttagtaactccctgcaaaatcttgaaaattgcaagtctaggtaacattgtatgatacattataaaatttgcaatttcaaaatcagattttgcgtcagaagtaatttccacttccagctccttatcgccataagctaactcttccattacaaacatctgcgatgtattaaattttgctctacccgtttcaaccttgtattcattctttgctttcttgaataataaagattgattaatctgaaaaatacagtcatctataaacttgtccttatcaatcttaaatttataaatagaacgctgcataagattcttacgaagtccaagatatatcttttcaaactcaccttgtgtcacataggctctaacaccattatcatatggagcattatcaccatttgtaatctcaatctttctggtacctttctgaaccatcagttccttgaactgttgcttaatcagttgtgcatgctcattcaaggtatcatcaacaaacaccatattatccagagtttttgttatctgctgtgaagaacccttcagcacattgtctgtattcatcactccgacagacaccagttcttccttaagtgtatccaccagtttaggactgattttctcctctggaattcctgccgattttaatgtttcaatcaaaatatcagcagtaacctcatccttgacaaaatgcatattatcattgaaatccttctgaagtgcagatgcaaaatggtcataataatcatttgctattacagtcaattcattaattctacgatcaatacaacgattgcctgtgttgtcaaccggcaatcttaatcctcgaccaatctcctgttttttagcaatatcagaaccgccagcttttagcgtacaaagtgtaaacacgtttggattatcccatccttctctcaatgcagaatgtgaaaaaataaacgcaagaggctcctcaaaagaaatcagttcatccttcttttcaagaataagactgatacctctatcaatatcttcttgtgactttgccttgagtttcacatcgctatcgtccacagaggaatcccagccttcaacatctaccgcattattcttcttgtctctagcaaaatatccctctcttacagcctgcacattcatgtagtctggaaaatactctttattcatttccagctcatgcgtatgagtcgttacatactttttgtactcttcatcaaaaatacgcagatactcgcctcttccatcaggagctgaatcatcacgcaccttatctaccgcatcaataaagaataatgtcaaagccttgattttcctacctgaacgaataatgttgagctgttttgtaaaatgattctgtatcgctaatcttatttgaattcgcacagcctcattcttctctatctcatgattactgtgtccaagctccaaaccaaagaatccttcctcagtagcaactgacaatggctttaatttatgaggttcctctgcaatacgataatccttatactgagataacccacccgataattcttctagagatgctccaccacctacattgaaatttttaaatctgattgttccaccttgatcttgtgagaatatctcaatctttgctttcaaatcggaagtaaacgcaagatatctgatatatggataatcctttggaatcacaccatagactgtcttaacaacaatctttttaactaaatccttctgatatgctgcaaaggaatccagcttataaatctgattgtataactgcttgtgtgtagcagaataacgtaaagtaaaaagtggctttaactcttcaatagcaactaaagactttgactttttctttttagtaccttcaatcttctgtggttcatctataattacgattggcttgatgtatttgatatcttcccaaagattttgctcatactcatctgttttcctaagtatatttgtatctttattgaatgcctgaatatttaacacacaaatgcttaaatcattactctcaactaactttgaactgatttgctttgggtttttactgtcataaataaagctatgcttaccaatatcaatgttgtaaagtctcttgaaatggtcagctaactgctccatagatttctctacccccttacggatagcgatagatggaactactatcatgaatttacgaaatccatactcttgatacaactcaagaattgtacgaagatacacatatgtcttaccagtacctgtctccatttcaatcgtaaagttatttccatcagccagaacattatcagcaaataaatcattggatagctgtacttttcgtaagttctctaatagcctgctaccaacaacaatgtcattatttctaacaggatcaccctcgcccactttgcgaatacgattaggtctgtaaataccatctacatgtcttgacaaacctctgaataattctacagtagaatgaattgcctgcatctgataatcaaggtcatcttcgaattggaatgtaatacgctttgccataattccattcctccttaaataaattctactgtatatgtaggcttgttagttccagcattcttttcaatcagagctttcaatcttcggaatgtctcatctttcagcgcaatgtcatccttgaatgctgaatctctgaaaataaatttgattggtaatgggtcaagctctgcaagttttccaaccagctcctcggtaatctgtgtttccaagcataccaaataactgcttgcatagagatatgtacgactgccaatatcagataactgctctaatgtttctgatagtgcaacatcacgctgacggagcattaactcatagactacatctacatcatttgcatctggcataaaatcaacaaggtctggtgtatactcaagttggttcatatctacctgtcccatatccataagagaattccatttgatattggtatcagcggttctaaatactttaaacccaatatctatatctgcttctggatgttctgattttattttatctccagctctacgaatgcgttctttacctaactgacacaaatttatatagcccaatttatgagcctcactagatttatctaataattcagataattgtatcataataaactttctattggcattatcttcataatttaactccattactgactgtgccgtggtagatgaacccgaaaagaaatcaagtattatatcatccttacccgtacatattttacataaaaatttcactaatgaagtcggctttggaaatggaaatatttttccactaaacaaattagttatttcttttgttccatcttgggacattcctatgtcatcaggtaattttgtactaacagcaatttttccaaaattatcaccagcctttctcatatcatcttctttccaatatcttaatgctggcttacttatattcaaaaacgagtaatctcctggaaaaacaattctattatcttgataatattgttcaaaagtttcttgtgttatagcccaagttctattgggatttgcaggatattcacttccatttttaggatttttgattgtaaaaaaactgttaggtctttcacttgctgtcgtttgctttgttaaatcatgtattctccatggtttttctggaaagtcctcagttgtaaaatattttctttctttaccatcaatactacatttaaaatttgttgtttttgcataacataaaatccactcaaaatcttgagaaattccatacggaacatctgatttcgcagtcctttttctccaaggaaatattgctacataattaatttccccaaatatttcattacatatttttaatacattatcaatctcattatcatcaatacttataaatattgctccatcatctgttaataaatccttggctatcattagcctaggataaatcatattcatccaatttgcatgatatctgttatctgacttagtatttacaatatacctctctcctacttcgttacgaacaccttcagcaatatcactttcttcttgctccatttcaaatgaatcattatatataaaatcattacctgtattatatggcgggtctatataaatcatcttgatggcaccataataattctgtctgaataacttcaacacttccagattatctccttcaatatagagattctctgtagtatctgcctccttactatcctctggaatgaattttagtgttcttccaataacatcttcctgagcaatcctttttgcattcttttttcctgcccaagtaagctcatacttttcgcttcctacttcctcatactgtccaagttcttcttttaaggcttcaaaatcaacctctccatcctttactgcagatggaaataactgagcaagtttctttacattatctccaacaatatcattaatctgctgtggcaccttgttatccatagcttgtttcctcctaactatctgctacaatcatatttttattatttattttatacaaaaaacgtataaaacttcctgttaaatataataaaaaatctaattcattctcatctactgaatcatcatgcttagcgtgcgaattattatactttgcataacaatcaattaacttaaaaaacatgtttgatacttctgaagaaagatttttattcttcaaatatacacctaaatcttttacctgattttctaatgatttatcattacctaaaaattgtttcaagaataattctaaagctaatcgtaaggagtcaactacttgtctatcatatttacctttaagcatatcgtttaacgcttgacgatactgattctgtgccttttcatatgtacttagccaatttatcacatctacaaccattggtttatcaaaaaacgcttcgctatacgggaaaaacttatattcttctccatctatgcatataacagcatttattccagataattttagagcaattgcaatcttttggacaaatgcatattgccttgaacaatcatctgctctagtgatactattagcaacaaattctaaaatctgaaaccatatatataatatagacttgtccttttcaattttaactgtccccaatgcttgatgtaataaagaaccatcaaatccccattctttaactccagtatatggataacctaaaagttcaaatatctttctcgtataaaactgcaaatcatattcatcgtatatagtacttgcaattgctgcaattgttctatttttaaatgctatcaaatcctctttaggtcttgtatatccaaatctgtatgcatattgttcttttatcttaagaatatctgcataatcatcatctatttctattggcttaatactattttccaaaaatatacctcccataattcttcattatcaagtgcttgtacttctgtcttaatttctttatttattttcattcgctctgctagagatattttatcttccgatgtttctgttttctcagtccgaatcagaactgaagccttatttaatactatagttgaatttgataatatctcgttgttacatgtttcacatttttctacgtttatatctatattgcctgttgcaattttatcactatttgataccataacaatctttatatttccgtcactgtcaatattataatccgatgtggagctatttaacactgaacctggctgtatgcttttttctatatcgctctgcgcataaagcggttcaagcttttcatcatcatattttatagtcagcattgcagccattacatcttcatttgtctgcatatctaaagaatatgtcaggatatctccctttttgagttgttgcttatcactcgatattactaccaagtttccctcatctgcgtacacagcgcttttgttaataaatattgtcattcccaatgtgcaaattaaacaaaatagaaataactttactagttttaagttgtttttaactatcttttttacctccgataaataatttagaaagattaatttaaaactttggtattattatagcacattacgattcccaaagtctgccctcgtaactcgaaactttgtttttttcacagatttgtagtataatacctatcatgaaattacaaaaattatacagcaaggtccgtcaggcccttgacgactacaatatgataactgaaaatgacaaaatcgccatcggtgtctcaggcggaaaggattctcttacgctgctctatgcgctttccggcatcagaagcttttatcctgtgccctttgagcttgtagcaatagcggttgacctgggatatgaggattttgatttggagccggtgaaggcgctgtgcgatgagctctctgttgagttttatgtggtgaaaactgatattggaagaatatctcttgagaaatctaagaatcaggctagtccctgctcatggtgtgcaaagcttagaaagggagctttgaatgattttgcgctgtctgtcggctgcaataaaatagcatacgcacaccatatggatgatattatagagactatgtttctttccctgctatatgagggacagttttattcgttcgcgcctgttacacagctggacggcagtgggcttgccatcatccgtccgcttatgtatgtcggcgagtcagatgtgaagggctttaagaataaatacaatctgccggtgtgcaagaatccatgcccttacgacggccacacacggcgcgaatatgtaaagcagcttgtcagacagctcaatatagaaaatccgggtgtcaagaagagactgttttctgctattcaaaacggcaatatcgatgattgggtgaaatgcactaagccttccgatgcttcatagagcgttttttctcatacatccttgaatcagcctcatggattatctcattaatatcctttgtgctgttatcgttttgcacagcatatcacatggcagctgtgataggtactatattatttccatcagtgatacatccgagattatccatcatttcagagatatcgcctatgtacatttcatttttccataaaaatgcctttcatacttatatcttttacagcttgtccgaatccagtacaatcgtaaatggcccgtcattctcaagctctatcttcatatcggctccaaacacccctctttgtactccgggaactgccttatcacactcgctgatgcagtattcataaagctcgtttgccatatcaggacttcctgcctccacaaatgaaggacgattgcctttcttacaatttgcataaagcgtaaactgcgatataagcaatagctttccgtctacatcatttatcgaaagatttgtcttgtcattctcgtcggcaaaaattctcatgtttataagctttttgatcattttatcagcaatctctttagtgtctgtctctgctatgcctatcaaaacgcacagtcccttttctatgctgccggttatatttccatctatagtgcactttgcatggtttacacgctgtattacaaatctcattattatgttgtctccttaaatatgttatttacatgttataaattggatataattattttgttacaatttatatgacatatagttttactaccatttttatccaacaataactgtattattctaaaccatatttataaaataaacaagtctgtctgtgacttttcccacatagtttcagtctagatcatatgaacaccgcaatccctaaagtgtatttcattaggcaatttgtattcatttataagctttcgtgtacatttatgaattatattgtcaagtggcgtattactgtgttagaattatagatataaaatttctacaaaccatttttttgactaaaggaggatatttatgaactacaatattgagggagagccattaccggttgtgatctgcaaccttgaggcaaatgagactatgattaccgaaaaaggtgccatgtcatggatgactccaaacatgaagatggagactacatcaaatggaggcatcggcaaaatgtttggccgtgcattttcaggtgagagtatgttccaaaatcgctacacatctatgggtggtccgggaatgatagcatttgcatcatgctttccaggatgcataagacccttccagattgcaccgggacaggaaataattgcccagaaatcagcatttcttgcttcaacctcaggagttgagctgtccgtatttttacaaaaaagaataggagcaggtttcttcggcggtgagggctttatcatgcagcgcctgtcaggaaacggattggcatttttagaatttgacggccacataaaggaatacgagcttacacccggtcagcagctggtgattgataccggatacttagccgctatgacaggaagctgccagctcgaaattcagactgttccgggtatcaaaaatgcggtattcggcggtgaaggattattcaacaccgttgtcaccggacctggccgtgtatggctccagagtatgccggtttctcagcttgcaggtgcaatcagaccttttattccaacaggcaactaaacctataaaacaggactgtcgatattcaggcagtcctgttttacactttgtactaaattctattgttttatattttatctatgccataccatttgcagttttgtacttccatagcatctcagcgtgattctgctcttctatctgtatatctgccaatagctttctgatatccgaatttccaaatacaaatacatcggaattgtactcgccggatactagcttttctgttcctatacagtctgtagccagataacagtcagctttcttgtcctcagaattgccaagcgaatcgtatgttgcagcagggttataattctttcccttagaatcattgcagtcaactgacggaacctttcccttaatcacctgatccaaagagtcaaaatgcttttgctcatcccttgctatttcttcaaaaagctccttaagcaccggatcctttgcctgattgctgtatttggtatacttttctatgcatgcctgttcctgtgtttttaaatcttcaatagcgtttgtttctttttctgttagaatcatttaatagacacctcctgtcagcattattatgtacaaaggtgtaaattatatttatgattgccacaattttaattaaaaaagcctctaaccgaaatcgcaattaaaaaataagatacataaaataattactcacagcacatgctaaactcatacttaggatgaaaaataacagtaactattcagcatattcaggatagctgcaaataaaaatttaattaaaacatcaaataaacaaaaagcaaataaacaagcatcaatcaggaggactattcatgagtaatacagggatatataatgccaatacacataataccgaccagaatatctacagccggcaaaactttaaacagtatcataccaataaatcaaacatctgcggcatatcagatgataaaactgactgcagccgccaaagtgccttctgcgatagcacaaactatgcggatttaccactcggatgcgtatgcgaaggaactgaagttagaaacagtgctgacgaaaatgtcaaaatttacaatataaagcactctcatcagcctatttagccagctcccaaaatgccactgcactggcagcagccacatttaatgaatcgacgccatgtgacattggtatctttacagtgtagtcacaggagtctatagtctgctcatgaagaccatctccctcagtaccaagcactattgcaagcctttcctctgagtgaagcacagggtcatctatactcacggaatcatcagtcagcgccatagcacaggtcttaaatccaagcttatgaagcacatcaatatagtatttataaacactgctatttcggtcgctgcaattttgggcactgctatcacacttatcatgcaatgaagcatctgaaaaagtgttgtcactgccgacattgtacttggaaaaatatgcccatggcacctgaaacacagttcccatactaaccctgattgcacgcctgtacaaaggattgctgcaggcaggagtgagcagcaccgcatccatatgcagtgctgccgctgacctgaatatagctccgacattggttggatttaccacatcctcaagcaccgcaactcttcttgcgtccctgcacacctcttcgacagaccttggcttcggcctgtacatagcacagagtgtgcctctggtcaaagcaaagccagtcagctttgtgagcaaatcaaatgacgcagtatatacaggtatattctgacatctttcgataatgcctcttgcctcgccatttacatgctttgtctccatcagaagagaaaccggttcacatcccgcatcaagtgccctctctatcacctttggactttcagctataaacatcccctcttttggattggctctgtttaaaagctgattctccgtcaatctggcatacacatccagattggggtccataaaatctgtaattgtgattatattatcagacatataatcaatcctccctcagatgtactaccctggctgccgcacgacgcctgctgtcctcctgggctgcataatgcttacgtgtggtatttacatccttgtgccctagaacatccgctacaagatagatatcacctgtttcctgataaagtgtggtgccatatgtactacgaagcttatgaggagtaatattcttaacggttgttacgagtctcgaatacttttttaccagattctcaacagaacgtacagatatacgcttcctctgtaaagagagaaaaagcgcattagcatgtccctcggcaggtgtaattatgcttctctcctcccagtacgaaagaagtgcatcacgtacctcatcaccaaaataaacaatcacatcagcaccaccctttcggtgcaccttgattccattgtttttgaaatctacatcatccatatccagccccacgcactcagatacacggatacctgttccaagaagcagtgtcataagtgcaaggtcacgaacctttgttttctcatggaaacgctgctggttcttggacagactgtctcctgactcaacctcatcgagaagctgtgcgacctcatcagtatcaagacggatgatattcttctcatgtattttgggaagggttaccttgctcgcaggattggtatctataaactctttcctgaaataaaaattataaaaagtgcgcagtgatgcaagctttcgcttaatgcctctctcgtcattggtgtgtacgacgccatccttctcataatactttagataaaacagatattcctcaatatctgaaggactgatctgatctaacagagatatagggtaatcccttatatcatatttcttaagcgatggattggcactcttcatgtactcgaaaaaggtctgtagatcatatgcatacgctatcttggttcttgaggacttatccgcatctattccgataaaaaaatccatacagaacttcggaagcttctgtatcatatctctgagctttaattcattttttatatttacgtcttcgtaataagctttgtctttcataataatactatataataatcaaagttgactctaaccaagtatttctttgattttctcctctatacgctccttgaccagtgcagctatatccttcgtcttcatgtccttgtactcatcatactcaataggctttaaatagtgaacctgcgttgtaacagggccgaaatgaaagctgttgaacaccttatatgaatctataagagctatcggaataattggaacatgtgatttcaatgcaatcttaaagcttcctgctttaaaatcctgcactttattcttattattgaacttatagccaccctccggaaacaagacatatctcttgccgtttttcacatccttagctacctcattgattatagtaagcccctgccttggattatctttctctaaacgctttgcctgaaccagatccacaaattccctgacaagcattgtatgcgacttctgcttatccataacaaacgacagtaccttgtcatgtgtagtaataatccccagtaaatcatactttccctgatggttgggatacatgatatagccgcctgtttcaggaagattctcaagaccatatgcttctgttgtaatttttcccgatttattcattaaatctatacagtgccgcatcatatcatatctctccgcttctgaatatttctgcggatgatcagccatgtatctcattttgggaacaatatacggcgctctgtgaaaatttgcaaatataacaaaaaatagttttaacataaatatccaatctcctgtttcaaaaacggataagctatagatactataacccaaatcctctgcaattaatctatattatataagaaacaggaaattttagcaagaaaacgttactttatatcctgagaataatatgaaacaactatataatcgccactgcggacattgccatctgtaagactattgagcctgcaaatttcatctacataatctcttttgctcacctgactgtcggcaatatatctatcggcaatgctccagacagtgtcgccctcctcaaccctgacgctggtataatacttgttataaggcctgctgtcaccagaactggcaaaaatatgaatagtgccacacaatataatgacagctgctataaatgcaacagcagtccatccaaacatttttcttctacctgataaagtattttctctcataaaaccacctcttgtattttcgaacatgtgtttgttgttattgtgattacataatacatcccgaacaatcgtttgtcaatagaaaaacgaacaaaatttcggaatatatgtttgcgtttattttagttttatgatataatttttaaaatacaatttttttattataattatgaacgaagaggcaaaataccttttgaccctcatatcattatattatttaaatattcagacggaggatttaactatggcattagaaaagatttcagacaagcagaaagagatactggagtttatcaagagtgagattttaaacaggggctatccgccatcagtgcgtgatatctgcgaaggtgtacatttaaagtccacatccagcgtccatgctcatctcgagacactggagcgaaagggctacataagaagagatcctgccaaaaacagggctatagaaattatagatgacagctttggtttacagcgccgcgagatggttaatgtccctctggtcggtcgtgtagctgcaggcgagccgatactcgcagtggaaaatatcgaaacctattttcccgttcctgctgaatatatgccaaataagcagtcatttatgcttaaagtcaagggcgagagcatgattaatgccggtatcttcgacggtgataatatcctcgtcgagcagcagagtgatgcttcaaacggagacatggttgtagcacttatagatgattccgctaccgtaaagacctactataaagagaatggtcacattcgcctccagccggagaacgacacaatggatccgatcatagttccggactgtgaaatactcggcaaagtgtttggagtattccgtttcttctaatatggcaaaaatatcgcacccatatgccatgctaaacagcacagcatatgggtgcgatattttaaattaccggtttcgatttataattccttaatcatagaataaatactacagtgaatgtacatccaccacttttccatctctccatattctgtcgagatcatagaactgtctgtcttctttagagaacagatgcacgataatatcctgatagtccatgagaatccatgtagagttgcctgttccctccacctgcttctgatgcactccgtttgtatacatagcctcatccacagcatcctccatagctgtgagctgatttgcattgtttccgtttgcaatgataaagtaatctgctatagaagaaacctctcctatgtcgagaactgtgatatcctctgcctttttgtcttcaagtgcttccactatctttttaactaaatcgattgtctgcatagcagttattcctccctgttgtctctgtatttagcataataattgtaagtaatctgggtagtcggatctattgctccactctttgtgttaaggaaattgattgtatcatacaatatctctgcaacagtcctatcaaggtctgaaaaagcaagctttcttatctcttcaagcctaggtgcttcacatctgtttggctcaatataatctgccacaaaaagtattttgtcaagaagccccatatctgcttctcctgtagtatgaactcttatggcatgcagtatctgcgcatccttaatgccatactcttcctcagccagcaccatgcctgcctttgcatgtaacagacccgggtttgatatctctacctctgttatgtctatatttttctttacacagagtccgattttcttttcagtcgaaagacacttggcacagtcatgaagcaggcctgcaagcattgccttttctatcgaatagccgtttgccatggcaagacagccggcagtatacatcactccgagtgtatgctgatacctttgtttatcaaggctcttctttagctttttctttatttcttttacttccatactctatcacctgtataaattattagcctgtatatatgacataactgcagcatccagaaacatttccgctcctttaggactcctatacccgtctgcctgcgacttggcacgtagcagtctcctgacctgagtagacgacacatccatcttgtcacactttaaaagtcttatatctgcccaaaactgttttttgatatgtgcaatcttttcttccatctgctgctttggaaaattttccctcaccataacaaggattattgctgtttgggctattatctcaggcttcatccatgactcaaaatagtccagagaatctccacccatgatgaaatacagttcatcctccggataaagcgcctttagcttttggagtgtcacatacgtatagctggtggactcatcctttatctcaatatcagacacctcaataccgggcactgcttctgatgccagcttacacatattgtaccggtggctaaatgctgtcattgcattctcagtcttgttcggcgagtgacctgacggaacaagcagaatcctgtcaagagaatactcttccatcgccttttgtgccatgtatatatgacctttgtgtatcgggtcaaatgccccaccaaaaatccctgttttcatggcttattccggaagcttaatctttggatttttcttcgcaggacggtaaaaaatcatttttttgcctattaccttaaccactgcagagtgtgttctctcaccgattacacttgcaatctctcttggatcatcgatgcagtttttaagaactgcaaccttgatcagctccctcttttcaagtgctgcatcaagagcctcgatgatttccggagtaagcgatgcctttccaatattgaaaatagggttaattgtgcttgcaaggctgcttaaatatgcacgctgtttacttgataaattcatatatactcttctccttacttgtaataatcaaactcgaaatcatacatgcggacagtatctccatcctcgatgcccatattttcaagctccttgatgataccctgctcacgcaagaatctctggaaaaaggcaaagcccttctccgagtccatatttgtgtatccgagcattttctcaatctttggacctgatatctcatatgcaccatcggctgccacctcaaccgcgtacggctcatccttaaagaatgaaagtgcaggatcaatctccggctcatatacagtaacctctttaggacaatttgcaagcaggttctttacctcgtacaaaagctccttaaggcccttaccgcttactgcggatattgggaatacctttatgccctgtggctcgaattcggctcttaaggctgaaattacctcattttcgtctcctgctatggcatctattttgttggctgcaatgacctgtggctttttgagaagctgtggattgtatgcttcaagctccttgtttatcgccttgatgtcagcaacagggtcacggccttcagtaccggcagcatcaaccatgtgtatcatcaccttagtacgctctatatgacgcaaaaactcatgaccgagtccaataccctctgatgctccctcgataagtcccgggatatcagctattacgaagccaaagccctcatccatatcaaccacaccaagatttggctgtaatgtggtgaaatgatagttggcaatctttggctgtgcattggtaactcgtgacagaagtgttgattttcctacatttggaaagcctacaagccctacatccgctatcacctttagctcaagctgtacctcaatttctattgcatcctgtcccggctgagcatatttaggagcctgcatggtggatgtagcatagtgctggttgccctgaccgccttttcctccgtgcaggatcacctgccttgtattgtcaccggacatatctgctatgacttttccacttgctgcatcctttatgagtgtaccctccggcaccttaagtataagatcctcaccattctttccgtggcagttctttttgccgccctcctgtccgggctctgctgcaaactttcttctgtgacgataatctgtcagggtgttgattcccttatccacgagaaatataacgtctccgccctttcctccgtcaccgccgtccggaccaccgttcggcacgtatttttcacggcggaatgatacatgaccatctccgccttttcctgattttatgataatttttgcacgatctgcaaacataattttccacctcatgctgaatgtctgcataaaacactcagtatactttataacaaatcattactatgctatatctgttatactatatctatataagacacagtaataacaaaatgatatgagggtccaaaggtattttgcccctcatttatgattaatcagattactacatgctgctaatttacaacataaaaaccccggctaataaaagtcggggtttaaatcttattcgttcactactggatatacggaagcctgtttcttatctcttccaactctctcaaatcttaatacgccatcaaccttagcatataatgtatcatctccaccgataccaacgtttgtaccagggtgaatctttgtaccacgctgtctgtaaagaatattaccagcttttacgaattgtccgtctgctctcttagcgcctaatctcttagactcagagtcacgtccgttctttgtagaaccaactccctttttatgagcaaaaaactgaaggttcatattcaacatgtcttacacctccttgaagtctagaatgatgtactcattcccatagtctctttgtattccttttagtcccagaatcatggaatccataagcagtgcaacatcacctgtcgccggcttgtcaagtctgtagtcaatcatacctgtctcttcgtctgtatcaaggctgtacttagcatgacacagctcttcagcggaattgatgaagttgatcaccagcgctgaaaccccggcacagattatatcataaccggaatctgcaaaacctgcatgtccctttgacttaaagcccatcttatgtccttttgaattctgataaacggttatagctatcattatccgttaattttttcaatcttaacctgtgtgaaagcctgtctgtgtccgttctttttgtgatatccggtttttctcttgtacttgtaaacgataacctttttagctctgccttctttaactacagaagcctcaactgttgcacctgcaactgttggatctccaaccttgagatcatctccgcctacaactaaaacctgatcaaaagtaaccttctcaccagcttcaacgccaagcttttcaatggtaatgatatcgccttcagatactttgtactgcttaccacctgttgctataattgcgtacatatggcacctcctatttatcattactcgccagttacggtgctgcgaaagtcgcaaacttatacctcactgtgcggcatacttcagtatattagcatagagtcatctattcgtcaagtgttttttctaaaatttgtttaagagatttgtggaccttttttcttgtcaactccaccagtccaagcttcgttatatccacaaaggtacagactgtattatcgtcctttatataccgtttgagcgcttcaataagcgtatcctttgatgcctcagacttcatattgatgaaatcaattattatcatgccggagatatttctgagcctaagctgcctggctatctcctttgcagcctccatattggtctttaatatgctattgctccccgacgatatattctttgcactgtttacatctataaaggtaagtgtctcaagctgttctattatgatgttgccaccacagtcaagccataccctgcgcgaggtcagattatcaatcagccctcttatgccatagagcgttgacaggctgatagctgaatcgtcatatctcattattttttcaggagcatggtcatatatgccgtactctgtaagaagactgtcatatatgtcatcgcagtcagtctttatccactccaccgtggcaaaatcaattgtcttcattaaaagcagataatcgctcatcccatgatatacgcatgaatagagcgtctgatgcggtgccttttttattatctgattgtatttctgtgctacagaatacgcatcttgcgaaacagctttatcctccacatttttggcattggttctgactatgatgccatagccctctttttcgtgatctgcacactttgaaagcacagccttacgtaaaagagccgccctttccttatccagcttcgatgaaacacctatctgtgtatcaaaattggtgagaatcacattgcttccgaatatagaaagctttgttgtgaccaccggatcctttgtctttagcgcatcctttatgacctgcacaagtatctcatcaccctcacacaaacctgctttttttgattttttgtttgtgtatacaggattttttgcatcatttagcgaaagataacagcttttattctgcgcaatggtcacaaatgccgcatttatgcccggcagtatcttatttacccttgccgcgtatatattgtttattatcgtatccttctcgggaaggagctggaaatccttataatttccgttttcatccatcagtgcatacactgtgtatgtattattattttttactgttttagtcagaataattctgttcattatgagatttcttctcccatgtcaagcagacaaatgagtgttccatcgtcttttcttgcatacacttcctgcctgtggatttgtatggcaagcggattgtaatcaaggccacacttttcatatatggcgtgaagcacaaactcaggctttatattgtcaatgcttcctgttgatacctgcatgaaaaactcaggctttttgttgttttccatgactgtaagcttgtatacaagaggctttatatctacctctctctcactctttttagtctttttcatcacaacaaaggatggctcgtcaaaaaaatgcttatctatcgcttccttccactcctctatggtgtatgggctctcatagccatccttgaagctaagcacatagtctgcagccgcaacaagcgacatagccttcttagcatcatcaggcagaagcacatagcctgtcacctctactccgtccaccatctgggcatttaaagcttgtatgcttttttctgtagactctgttgtatttacatctatgtcaaagtactcaccatcacttgtgatgcccactccaagcggtgccgcaaacgacataatctggtgagcagaatacccctctgagtagcggatatcaatatctgcccttctgaccgccttctggaagtatctcatcatatcgagatgtcctataaacttcatgcagccccattttttaaacttcactctaattttcatagcagacacctcctccatagctctttgcaccgcaggcagagcacctcatgcggcagttaggagtgactgtctccttatgggctgtctcccactctcttatcataaactgctttgtcacacctatatcgataaaatcccatgggaatacttcatctaaaggcctttctctcattgtgtagaaatccggatccagtccgcattcctttatcgaatcaatccatctgtcatagtcaaaatactctgtccaggcatcataatatccgcccttttcgtatacctttactatcgcatcgcaaagccttctgtcgcctcttgcaagtatgccctctatcacagtgacatatgcctcatgccagttgtatctgatgctctttctgttgagctgctcctttacatggtcatttactattttggctctgcccagatactcagatggctcatacattctcgcccactgaaatggtgtaaacggctttggcacgaaaaatgatgtacttatcgtaatctggcattttccggctctcttttcctttggaacggtatcatagtataatgccgccacatcgtttgcaagctcaggaatccccctcatatcttcctctgtctctgtaggcagaccgagcatgaaataaaacttcaccttgttccagccgccctcaaatgcctgttttgaaccgttcatgatatcatccacggtaaggcccttattaatgacatttctaaggcgctgtgtaccggcctcaggtgcaaaggtcagactgctttttttgacatcctgcaccttctgcatgatatcgagcgaaaacgcatcaattctgagtgaaggcagggagatatttatcttcttttccttgcagatatcaagcaaaaatgtgataagctcgtcaagctccttgtagtcggatgagcttaaggagcttaaagaaatctcctcgtgtcctgtatttttgataagagccgctgcaacgtcctttaggtggtcaacctttttctcacggtttgggcgataaatcataccggcctgacagaaacggcagcctcttatacagccacgctgtatttcaagcaccattctatcctgcgtagccttgataaaaggcacaaccggtgcctccggataagttgagttagtcaaatctacctgcacctgtttttttatctttacaggaatatcatcatacttaggcttcatacagcaaattgttccatcctcattgtactccacctcatacaaagcaggtacataaagaccctcaatctttgcagcctcatgtaaaaactcttcccttgaaagaccatcagcctttgccttcttataaagctcaaagagattgccatactgtgtctcgccctctccgatataaaatatatcaaagaagtctgcaatcggctccggattgtaggtacaaggaccgcctgcaatcacaatagggcagccttccgctctgtctcttgaacgaagcggtatctgtgcgaggtcaagtatctgcaaaatatttgtgtagcacatctcgtactgcagcgtcatggctacaaagtcaaagttctttataggctcctgcgactcaagtccgaaaagcggtatattctcctgcttcatgatttcatgcagatcaggccacggagaataaactctctcgcaccacacgtcatccatgcggttgaacatatcatataatatctggattcccagatgtgacataccaatctcataaacatcaggaaaacacatcgcaaaacgtatatttacctgcgatgtgtctttcattactgagttgaactcattcccgatatatctagccggtttgtctaccttcataagtatctcatcacttaaagctagttttctcatataatttcctctaaataattatagtgttttaaggctatcgctgtgccagctcccctgctatctctgcccatgtgatatttttctgagccataagaatcatgcagtggtacataaagtccgatatctcaaacttcaaatcatcactgtccggatttttggctgccagaataatctcagtgcactcgtgtccgagctttttcaatatctcatctatgcccttttccatgacagcattggtgtacgagtcctcctttggattcttcatacggtcaactatcaccgcatagactgattcaagcactgtaagtggattcttctccacatactcctttttcacgatattattgaaaaagcaggtcctgttacctgtgtgacatgcagctcccacctgcgaaaccttcgcaaggatagtatcataatcacagtccgctgtcaaagactttacgtactgtaaatgtcctgatgtaagtcctttggtccaaagctcattgcggcttctgctccagtaggtcatgcggccgctgtttatcgtgacattgaaggcctcctcattcatataggcaagcatgagcacctgctcattgcggtaatcctgcactatgacaggcaccatgccgtcagaattaagctttaaatcagaccattttaagtcgggagtaaaattatcaacaagtattcctccgtcagaaagctttgtctttatcgccatgatatcattttcaggatcattgataaactctcctgcaatgcctcttagtgtttcacgcttcatgacatcaattattttatccatgtcaaactgcggcatatagaccacatacggtgtggatgtgagattctcaagcgcatctattatatctatattcaagaccaaaagctcatgaaaggtatcctctatctcctcctgatgtttgaaaatatagtctacattgctgattgacaaaaggattttatccttgccaaacttctcgcttgccacatttgcaagctcaaggcttgaatcctttgtggcattgaagatgacctgtaaacagcctgcatataggagctttttcacgtcctctatgcggttgatattgcctccggcgcacacctttatgtcgatatttctgtttatattttctatcgtatgtatgtttttctcatgctcatcatcatcagttgaaagatcaaaaataataatcttgtctatgccactgtcattgtagagctgacacagattgtagacgtcgcccataactgtcatatcagacgctgatttcacggcctggccgttctttaaatacagtgtagcaacgatgttcttaaaaccagtcaaattacaaacttcctttcgtggacatcacgtcctttattctgctatcataggtgcaggcatcgtcaagcgccttggcaaatgccttaaacatagcttctatcatatgatgattatttcccggtgtcaaaacctttatatgcaggttcatcgcagcagagtaagaaacggcatagaaaaactctctcaccatctctgtatccatatctccgactctctcacaggtaaactcaccgtcaaactgcaggtacggtctgcctgataagtcaatggcacaaagcaccagcacctcatccatcggtaaaataaagcttccaaatctctttatgccctttttgtctccgacagcctgtgctatagcattaccaagcactatgccgcagtcctctatagtatgatgacagtccacatttaagtcaccgtcgcatgtcatatcaaggtcaaaaaatccatgctttgaaaagccctccagcatatggttaaagaaacctatgcctgtgtctatatttgattttccggttccgtctatatttaaaccgaccgaaatatcagtctcttttgtttttctgctaagcttagcgcatctatctgccatttcttactcctttgactaatcctcaaatctaaccttgattgaatttgcatgtgccgtaagcttctcacactctgcaaactgctcaatatctgtatgtattctctcaagtgcttctcttgaatatgagatgatgcttgactttttgataaagtcatctacagataaggctgagaagaattttgctgttccgtttgtaggcagaacatggtttggtcctgcaaaatagtctcccaaaggctctgatgagtactctccgataaagattgctcctgcatttttgatttttgtcatgactgagaaaggatctcttgtgacaatctccatatgctctgaagcgatatcgtttactgcatcaattgcctcatccatatcctctgcaacaagtatatatccgtagttttcaagagatttctcgatgatttcttttcttgagaggacctcaacaaacttatcaacttcctctgatactttctttgcaagctcctcacttgttgtgatcaagatagctgatgccatctcatcatgctcggcctgtgaaagtaaatctgctgccacatagcgtggatttgcagtctcatctgcaagcaccaaaatttcgctaggtcctgcgattgaatcaatgctgacatatccaaacacagcctttttggcaagggcaacaaaaatatttcccggtccaacaatcttatctacctttggcacactctctgtaccaaatgccattgcagcgatagcctgtgcaccgcctaccttgtagatttcatctactccggcctcgtttgcggctacaagtgtggaaggatataccttgccgtcagctccacatggtgtacacataacaatcttttcaacgcctgctacctttgcaggaagcacgttcatcagtacagatgaaggatagacagccttgccgcccggcacatatactcctgcctttgctataggtgtgaccttctgtcctaaaatgatgccgtcctctgttgtaaaccatgagttctgcagctgcttctcatgatattttctgatatttataagagctttttttataacggcaagaagcttctcatcaaccagctcatatgcttcctttatttcttcctctgtgacacggatatttgatgcatccacatccgctttatcaaatttctttgtgtattcaaaaacagccttgtcacggttttcctttacattgtttataatctcatttaccgtgctctcatactctgtatagttgttagggcttctcttaagcaggctctccaatatgttcttctgtgaatcctttgtaagttttaaagttctcattacagcctccgtctaaaatcatgtattgatataaattatacgctatttgataacagtcttcaaatcacttatgagctttgtgatacgctcattgtccatcttcatgctgacctggtttaccacaaccctcgcagacagcggacagacctcctcaagcacggtaagtccattctccttaagtgtagttccggtctctactatatcacaaatcacctctgaaagtccaacaatcggagcaagctctattgagccgtttagctttataatctctaccgtctgatgctttttattgtagaaataatcttttgcgatatgaggatacttggtggcaactcttatctgctcatgatgctgtaaaagctcccttgcgctctccggtccgcatatgcacatgcggcattttccaaaacctaaatcaagcacctcgtatatatttctgccctcctcgaggatggtatcctttcctaccacaccgatatcggcagcgccatactccacgtatgtaggcacatcaggtccctttgccaggaaaaatctaagcttaagctcctcatttacgaaaatcagctttctggtatccggatccttcatctcctcacaggtgatgcctatctgctcaaaaagctgcaaagtcttctttgcaagtctgccctttcccagggcaaaggttaaatatctgtcatcactcatcttttattcctctataaactctactctgtttatacggttgtctaccgcatatgaagcatagtcctctttcgttttatttttgtccttaagcaccatctgtgtatttaccccatctcttcgaagctccatagagcgcttgattgccgcatggtatacagcctcctcaaatactataagtgatgaattctcaatgacaggcacatcaatatcctgacggcttaatgctgccatgagctgatccacaacaattgcaaagccgattgcagcagcgtcctttccaaagtgtgaaagcagcttgtcataacggcctccctttacaataggctctcctgtaccatatgtgtagccctggaaaatgatacctgtgtaatatgtgtagtcactgataagtccaagctcatacgaaatatatttctcgatgccgtatgcctttaagtattcacgaagcttaagcagagtatcaatagatgataatatctcatcatatcccttcgcaagctttaaagcctccataagctgctcatcctgtaaatcgaaattgtctaatagtccaaacagcttccttagcttgtcgttcattgaaagactgtcaacaaactcctccacaccgaagaaattcttatttgctatgagctctcttaggttttcctcctgctcccctgacagccctgctgcctttgtgagaccgtaaaagaactgcgaatgtccgactgaaatctggaaattcttaagcccgctctcaagcatcgactcaactgtcatcgaaagtatctcggcatctgcagagatagagccatcacctatcagctctgcaccgcactgtgtgctttccttgagcctgccctgataatccgatgaattgataaaagtattgccaagataacacagcttgacaggcatatcgtcctctatatagtacttagccgcacttcttgcaatagaaggtgtgaaatccggacgaaggacaagcgtattgccctccttgtcaaaaaacttgtataaatcctttgaaggggttgttccgacatcgcttccaaaaatattaaaaaactcaaacgtaggtgtcatgatatcatgatatccgtattttaaaagtgtacggtgcagcttatcctgcaaatacagcttttttttgcattctccgttatatatgtctcttactccgtccggagtgtgtaataattgattttccataatctgtaaaatctcgctttcatgtagtaaagtgttatcgtggtaatatgctaccatacgagagtaatactgtcaagccctgcaatttaagtcaagctgaagtgtgttcagatacggcacaagtattccgggcacctccgggaggaaaaatgccggctcaagctcctcatagcggaagctctttctgccgccttctgcagctctatcccagaattctgtcagctttttaaacgtgagataatagtattcgttcctgtgtgtgtacgatataaggataaatgcaacaccatcctgtttttcaaagcatctcataaactctacctgatgctcatgtatattggcaaggggaaacgtgtcggtattacattcttttgcatcaaagcataccgggattccctgtacagcgccaatatagtcaaccgtactcttctgctcgaaataagccagtgtaatgtgtctggtttccggctccatctttataggtgtaatcggagtgggaatcttttgtatgagcgccaggccgttctccctgtatttttcatttgtcttgtttatcatgtcctctaaggtcgagcctcttaagcctcttgaattccaggttgccatatcgtttctatcttccttaatactgtaagctatgcgacgtaaagtaaataatgacgaaattaaagccccaccctgctccatatgtcaggcaaagccgcctctatatatctgccatcaggcaaaatcacatggtgcgcatgcaaaagctggctggtcacatgataattttctttgtaaaaagcattaatccttttatcaccatacttcatatcacctatgatcggatgaccaatcgatgacagatgtgccctgatctgatggcttcttcctgtaatgagatgcacctcaagaagagttgctttatggcacgaagcactcatctcaattgtcttaagaggcctgtaggcagtctttattggcagtgattcatcacttatgggctccttggttatctgcaccttatttacagcctcatcctttgtcagaaagccctctatggtcataggctcatcaacctctcctgcaacaagcgccatataatacttttctgcggttctgtccttaagcacctgtgacaggtactgcagtccatgaagcgatttacccatcagaatcagccccgatgtatttctgtccaggcggttgcacaccgatggcttaaagctcttatatgtgtcaaaatcaagctttccctcttttatcaggtatccgataagcctttcgtttgcagaaatatcagtctcctttgatttctgcgacagcatattgactggcttgtttgcagccagtatatcatcatcctcgtataccacaccaagtccgtcaggctttagtacactaagtgccttaaaatccttcatcagactgtcctcattgacggaaaacttagcaaatgtatcatctgacagaaaaatcttgattttgtcgtcaactgacacaatttctgtgcctgacgctttcttatcattcagttttatgttcttcttcctgagcatcttgtaaataaagcccatggatgcgtttggaagtatctttttaaggtatttgtcaagcctctggcctgcctcgtttttaccagctttaaattctttcattgtcttatcttgtatatctatcttttcttcttgtggacgtttctgattgttttctttttgtgcgctgtgcctgcggtgttacttccgcttccgtttttccctcgttctgttgcatttttcaagtttttccttacacctgcattcttgccgctgccatagctgctgtttgaatttttatcagacttagaagtttttttgtcccagccgccatcagtatgcattttcctaggctttatcaggcactttttgtcaaatccgattaagtcctccctgccggccttcacaagtgcctcgtgcacgagatcgtaattctttggattgcggtactggatgagcgccctctgcatagccttctcatgtgggttagttgtgacatacaccggcttaagtgttgccgggtcaagtcctgtatagtacatgcatgtagagatggtagacggtgtcggatagaaatcctgcacctgctccggcatatatcccagatcgcgcagatactctgcaagctctatcgcctctttaagcgttgagcccgggtgtgaagacatgagataaggcacaagatactgctctttgcctatttttttattcatatccttgtatgccttcacaaagctgtcgtacacctctacactcggttttccaagcctgctcaaaacagcattggagatatgctccggagccaccttaagctgtccgctgacatgatactcacacagctcacgaagaaacgtcttatctttatcatacatcagataatcaaacctgatacctgaacggataaacacttttttcacctttggcagtgcacgaagctctctaagaagctgtatatagtcactatggtcaactatcaggtttttgcacggcttaggaaacaggcactgctttgtaggacatgcaccccttgtgagctgttttttgcatgccggctgcctgaaattggctgtaggaccaccaacatcatgaatatagcccttaaagtccttatcctgcgtgataagctttgcctcttctatgattgactcatgacttcttgtctggattatcctgccctgatggaaggtcagtgcacagaaattacagcctccaaagcagcctctgttgctgataagagaaaactttacctcgcttatagcaggcactccgcctgcctcctcgtagcttggatgataagtcctcatataagggagtgcatagacctcatccatctcatcctgcgacaacggcttttgcggtggattctgcaccacaagcgtagagttgtcatacggctctacgagcctctttgcacagaaaggatcagtattgcagtactgtatgtaaaagcttcttgcaaactccctcttgtcctcttttataacgtcataatccggaagctcaatcgcatcatatatgatatccctgtcctttgtcttgaacacggtaccatctataaacgtgatatcctttacatccataccgctgtcaagtgcatccgctatctcgatgatgcttctttctcccatgccatatgagatgagatccgcaccggaatctaaaagaatcgagcgcttgaccttatttgaccagtaatcataatgtgccatgcgcctaaggctcgcctcgatgccgcctattatgatagggatttttttataagtatggcgtatcaggttacagtacacaacggtcgcataatcaggcctctttcccatcaccccacccggtgtaaaggaatcctttgctcttcttttctttgaaaccgaataatggtttaccatggagtccatattgcctgctgataccaaaaaaccaaggcgcggcactccgagtatggatatagactcatcatccttccagtcgggctgtgaaatgatgccgaccgtatagccatgtgcctgcagcagccttgcaattattgcatgtccaaatgacggatgatccacatatgcatcaccgcagacatacacaaaatcaagctgctcaatgccctcatctatcatatcctgttttgaaatcggtaaaaaaccattactcatatcatacctcataattaaaaattattttatttgccggattttatctgcataagcatatccgtttcagcctgtgtcaaagctctgtacgtccctgttttaaggtcatcaggcagcttaagcggtcccatggatattctctttaaatagattaccctctttccaagcgcctcaaacatccgcttgacctgatgaaactttccttctgttatcgtaagctcaatctcggatacgctgccactttttttaataacaagctccgcaggctttgtaggtctttcctcgcctatatcaatgccctctttaaacctgatgatatcatcacaagtcacctcaccatcgatacatgcatagtaagtctttgccacatgctttgaagggcttaagagctcgtgcgaaagcgctccatcatttgtgataagcaaaagcccctccgtgtctatatcaagccttccgacaggaaacagatcatcatgcaccgcatccgtgatatagtccatgactgtatcatgcacattatcacaggtcgcagaaacacagcctgatggcttattaaacaggtaatactcatacctttgatacttaactattctgccgttaactgatacctcatcggcatcagtatctacctttgtctcaggttttacggccaccgtgccatttatggctatctgtccggtctttataagcttttttacctcagagcgtgtgccaagccccatctctgataaaaatttatctaatcgaatcatattgatatttctctccacatatactgtcacatgagtaaaaacaaacttaaaaaattactgtttatcgcttttatactgctattttgtatttattacatattgtttccgtcacaggtaagtacgtgcgctaaagcaggcataatgctatggttcaaccagatatttccgcttctatttatatttacgattttatctaacctgattatctcaacaaatgtgctgcaaaacattccccaaaagcatatcatgctttttacatacataataggcataatatttggatttccgataggagcaaagctcacagcagatttttgttccaaaggatacatagataaaaatcacagggaaatactgagtgcactggcaaaccatttcagccttccctttatcattacctatgcactgtccgagcagcttggcatatgcagccacttcagcatttatcttgtgtcactgtatctgccatctgctataggaatgatagctatactttcgattaacaaaaacaaaagcttaacacaaaaaattccggctcaaggatttaagcttaacatgcaaatcgttgatgccggaataatgaaagggtttgaaacccttataaaactctgtggatatattgtattgttctctatagtctcacgtatcccacagacaattgcccaaaaggctgactgcagcatgccgctgtcggcagacataataggtgccttctttgaaaccactaacggtatcggcatagtctgcggtctatgcatcccacgcaccctgtcaatagtgctatgcattgcacttctgtcatttggcggtgtatcatgcatggtccagaccaaatcaatattccgggatacaggctttaggctttacagatacatactgcttaaggcagccatgagcatactctcatgcctgttatgtattatcctattttgcatcctcatctgaatcggaaatattggtgatttctatgtcatcatcagatgtatctgtatctgaagctgcctcattgtcagacgactctgcccctgcagcttcatcgccattctcttccggtgggaaaagctctgctctgtttgctgcaacaacatcctcaaactgctgcagtgaacttataagactgtcatatctggcctttgaagtctcaatagagcctgttaagatgtcctcaatactcttgagctggctgtccgtatatgccatggcactcattctgagattatttgcatcgtttgtggcactgtcaagtatctcctgtgcctgctttgttgcaatctgcactacctcattcgcctgagcatatgcctgctgcataatctgatgctcgctgacaagctcatttgtctgaatctgagcctgcgcgattatctgatcagccttcgcctgtgcatcagcaaggatagcctccttattactgataatcttctgatatctcttgacctcttcaggggtctttgtacgaagctctgaaagaagctcctctaactgttcacgattgacaagaatcttgtttcttgaaataggtgacggcttgcagccatcaatatagtcttcgatttcttcaataatctgttccattttactgctcataaatactgtctccttacctggtaatattgtatttagcataaattctatcaatgaactgttcaggtacgaactttgatatatctcctccgtatgatgcaaattccttgacaattgtagagcttaaatatgaataattgaggctcgaagtgagaaaaaccgtctctatttccggattctgtactccgttagcctgtgcaatctgcagctcatactcaaaatctgtcactgcacgcaatcctcttattatgattgttgcattgatttccttcatgtagtcaactaaaagtccttcgaagcaccctaccctgacatttggtatgtgtgctgtcatttcctttatcatactaacacgttcttccaaagaaaacaacgagttttttgcactattattgagtactccgacaaccagctcgtcaactattctggctgaacgctctattatatccaggtgtccaaatgtcaccggatcaaagcttcccggataaattcctaccttcatattgtatctcctatgcacgctttatgaaaacatgcttgtttgtcttataaattttttctttgactatctcatagccaagctctgtgagataaccaaaatcagtatcgtttgaagcctcaaccacgataagtgtatcatcctttaatatatcgctgtccgaaagtgtaataagcacttccttttcaagctccttattgtatggcgggtccataaacacgatatcaaatttgtatttgccctcaagcgtacgtactgccgtgacagcatccgtcatcatgagtcttgagaccttatcaaactttgtaaaatggatattgtcctcgatgcatgaggcggcttttcttgaattctccacaaatacagcataagctgcaccacggcttagtgcttcaagtcctatctgtccgcttcccgcaaacaaatctaaaaaatatgctcccggaacatcaaactgcatgacattaaaaagagtctccttcgtcttgtcagtagtcggtcttgtatcttttccctcaatagtctttagagggaggcttctcgccgttcctgctattattctcatacttttctccctgttatagtctatttctgatcctttaagacgtccttattctttgcaatatagtcaataagtgaaacaactgtgagcacaagtgccacataaatgaggattgttccaaggatatttaaccagccaagctgcagattgatattaaaaataataacaataaccataagcatctggaaggttgtcttaaactttccccagtagcttgctgcaatgacaattccattgtctgatgcaacgagtctgaaaccgcttatgataaactctcttgcaatgataataagcacaacccatacaggtataagctttaaatcaacaaggcatatcattgccgagcacacaagcagcttgtctgcaagcggatccataaacttgccgaaatttgtaacaagattgtattttcttgcaatttttccgtcagccatatcggtcagacttgcaatgataaatatcgcaagcgctatataatttccgtatccgtcaaaaaacggtgaaataaggaaaaatacaaaaaacggaataagtatcactcttaagattgtaagtttgtttggtaaattcattttacaagttctcctatcaaatcatattcatacgcaccggtcaccataaccttgcatatatcgccggtcataagtgtctcatcagtgttgatgaatatatatccgtcaacattcggtgcatctctgtatgtacggccgatatatgcattttcatcagccaccttaccctctatgaaaacatataattctttaccctttagtgtctcatttttatcaaaaatgacctcttcctcaagctccatgacatcagcctgccagtcagcctttatatcctcatctatctggtcaggcattgcagctgcctttgtgccctcctccggggaatacgtaaaggctcccagacgatcaaactccatatcatttacaaactgcataagctcctcgtgattatcctgtgtctcacccgggaagccgcatataagtgtggtccttaatgtgatatcaggtattctctcacgcagcattctgatacgctccataagctcagcctttgttgtttttctgcccatgcgccttaaaatatcgtcattgcagtgctggattggcatatccagataatggcataccttctcatcctttatcatggactctataagctcatcgtatatctcctcaggatagcagtacataatccttatccagaacagcccgcttatcttattgagctcatccaaaagcttatgaagtgacttctcaccatacaaatccactccataaagtgtggtctcctgggcaacaagtataagctcctttgctccctgctccacaaggctcttcgcctgttcaatcaaatcctccatcggcacacttctgtaacggcctctgacagatggaatgacacagtaggtacagtttttattgcacccctccgctatcttaaggtaagcgaaatgccctcctgtggtaacaatacgctttgtctttatgctgggaagtccctctaaggtgtgcagattgctgtatctgtgtttttcaagtgtctcatggacagcttcaactatagtatcatatgaattggtgccaagtatggcatcaacctctgggatttccttaaaaatctcatccttgtatctttgtgccagacagcctgtcacaataagtgatttgcatttgcctgtctccttatactgagccatctcgagaattgtattgatactctcctcctttgcatcacctatgaagcagcagctgtttacgataatgatatcagcctgcgtctcatcatcggtcatctcaatgccgtcatttgcaagcatgcctatcatatactctgaatccacaaggtttttatcgcatccaagcgaaataaataataatttcatagtacctctcaaatgtaagtatttacaattaaagggaaagacaaaacagcctttcccctcctagattaagcctcttcgccttcgtttaaatcctcatcatctgagacgattctgacagctcccgtgtacagctcctctacagcaatagataatggcttattgcacttagggcgtgcgataagtggttctgcgccatcaataatctggcgtgcacgctttgctgcagcaataacgatagaataacggctgtttactaccggctcttcacctatctctacattgttgtttactaccttcattaactctacatacgatggatgtatcatattatttatctcctttcgaaaagcttaaaagctcttttctcattttatttataaaatctatatttgatgataccagataatcctgattcttttttgtgtcgtcagagctgtggatgatatcattcacaagctctacacaatcgtcaagcttatcatttaccactaaataatcatatttctctatgcctaaagactcctcatatgctctcgaaagtctctgtgcacagacctcttttgtctctgtgcctcttcctacaagccgatccttaagctcatctgcactcggcgctgacacaaacataagcaccgtatcaggaaactgcttctttatctttaaagctccctggatttctatctcaagaatcacattctttccggcgctaagctgctcattgacatatgactttggtgtgccgtagtaatgatctacatacttggcatactcaagcagtccatctgcctttatcatctgttcaaattcttcctctgagataaaaaaatactctctgccatgctcctcacccggccttggacctctggtcgtggctgatacgctcagtgcataatcatcaccatgctttgccataagctccttcatgatagttccctttccggaacccgaaaagcctgaaaaaacaactaattttcctgtgttactcatcacaatctcctaaaattactcaatattttgaatctgttccctgaccttttctatatcagttttaagactgatgcctgtgtcagaaatcttaagatcattggactttgaaaggatggtattcgcctcacggttcatctcctgtgcgaggaaatcaagctttcttcccacactgccaccggcatttaacgaatccttcatggaaaggatatggcttttgagcctgactgtctcctcatccacacagatcttgtccgcaaaaatagtgacctcctgggctattcttgaatcatcaagctgattgtctgcaagcagctctcttagcttttcctcaagacgcgcacggtattcgataataatctgtggcgaacgctcctcaatgaaatcaacatatgataccatattatcgagcttttcgcaaaggtcttttttaagattttctccctcgcgcacgcggctttcaacaaatggctcaaatgcaccgcgaagagccttctcaagactgctccacagctcatcctcatctacaggctgctcctccatcgcaaatacctccggatatctcgacagcgtgctcactcttatatcattctccagtccgaattcctccgccatctgattcagatacttaagatattctcccgcgagagccttattatactgcaatgagagattattttctgtaaaatcctcatatgtgatataaatatcgaccttgccacgctctatgtactccttaagcagagtccttattgcactctcgaagaaattgagctttttaggcatcttgatattgacatccagatatctgtgatttacagattttacctcaactgtaatcttacggcttgcatctgcgtactcgtatctgccaaagccggtcatacttttaatcataatttttcctttcgcatatgcatagatgagtttattatataactccttgagattttcgtcaaatatattataatataaatattcatgattataaatattcagcactttagaatatttacaggaaataaggaggaacatcatggctttagacggaatagtcatttcaaatatagttgcagagctaaacagcacgatactaaactcaaaaatcagtaaaatcgcagaacctgaggcagatgagctgcttcttaccctaaagggaccaaacggctcgttcaggctttcgatgtctgcaagtgcatcgcttccattcatctacctgacacccacaaataaggtaagccctctcactgcccctacattttgcatggttttaagaaagcatatagcaaacggacgcatcacaaagatttaccagccgggcatggagcgtatcataaactttgaaatcgagcacttaaacgagatgggcgatctatgccacaaggtgcttattatcgagctgatgggcaaatattcaaacatcatctttaccgactccgatggtacgataatagacagtgccaagcgtattcccgcatccgtaagctctgtgcgtgaggtgcttcctggcagagcctacaccatccccgcgacacaggaggataaatataatcctctgactgtagattcgaagcagtttgcggatattatatcagcaaagccgcttactgtttcaaaggctatctactcatccttttccggcatcagcccccttgtggcaaatgagctggctcacagggcaggccttgacgcggactcccctgtagctgcctactcacacgatgagcttttgcacctgggaagcaacttcacatggatgatggaggacataaaaaataatcgttttacgccgaatatcgtacgtgacggcaatgagccaaaggaattttcttcaatagagctgactcagtatagcgatttaacggtcacaaaatatgaatctatatcagaggttttagagctttactactctgagagaaacacctatacacgtatacgccagaagtcagccgacctgagaaaacacgtaaataccctcttggagcgaaaccagaagaaatattccctgcagatgaagcagcttaaggactccgaaaaacgcgaaaagtacaaggtgtacggcgagcttatcaacgcattcggctacggacttacaccggacgacaagtttcttgaagctgcaaactattatgatgacaacaaaatcatcaaaatccctatcgacaacacaaaaactcctgccgagaacgcgcagaaatactttgacaaatacggaaagatgaaacgtactgccgaagcattgaacgagctgattcttgaaacaaaaggtcagatagaccatctcgaatcaattcagaattcactggatatcgctttaagcgctgacgacctcgtccagataaaggatgagctgatagaatacggttttatcaaaaaaggaaagggttcaaagaaacagaaggtaaagagcaaaccattccactatatctcatcggacggctttgatatgtacgttggcaaaaacaactaccagaacgatgagctcaccttcaagctggcaaccggaaacgactggtggttccacgccaagggcatgcccggctcacatgtcattgtaaaagccgaaaacaaagagctgccggacagcacctttgaggaggccggcaagctcgcaggctactactcaaagggcaaaaatgccgacaaagtagagatagactatctgcaaaagaaaaatgtcaaaaagccaaacggtgccgcagccggctttgtcgtgtattacacaaactattctctaacgattcacccggatatatccgatatcaggcagattcagtaagcagattatacttatttcataacaatttcataaccattccaaaacgcttaaagtaaaaagctgatatacacatgcatagtcctgcatgctatatcagcttttattttagccatttaagctcatcacagattcatcctctttaattgttcttttgcaaattcatccattttctttttcagtattctgttttccggtgtacaaagcgccgggtctgcttcaagcacctcatccaccatctcagatgcttcctttagcacatcgctgtcctgatacacatccgcaagtgcaaacgcaaggtctccactctgcctgattccaaagaaatccccgggacctctgagctttaaatcctcacttgctatataaaagccatcatttgatttatttagtatctccagacgtttttttgatttctttgaatttgacgaattgatgaaaatgcaatacgactgtgcatcccccctgcctacacggcctcttagctgatgaagctgtgcaagtccaaacctgtctgcattttctatcatcatgacggttgcattgggcacatttacaccaacctccacgactgttgtggacacaagcacctgcgactcattatttgcaaagcgctgcatcacctcatcctttgccttgctcttcatcctgccgttaagcacatctacagtgatatcctttggcagtgccgctttaagcacatttgcatagtctgtgacattttccccttccgagttttcggtttcctccacaagagggcaaataacatacgcctgatgaccggctctcacctgctcagcaataaagctgtaggcctttggcctgaatgccgtgccaaccacacagttcttgatcggaagcctctttgccggcacctcatttatgacagagatatccatatcaccgtatatgattattgctaacgtacgcggtatcggagtggcactcatcacaagtatatgtggctttcttcccttatccgagaagctctctctctgcttcacgccaaatctgtgctgctcatctgtgataacaagcgacagattggaaaaatccgctttctcctgtatgagcgcatgagtgcctataataagcgcatttttctcgttttcaaggcacgcataggcttctcttttctgctttgccgtcatggagccggtaagaagcacaacaggactgtcaagtccaaactgactaaccagtgagcaaaacgtctcataatgctggtttgcaagcacctccgtcggagccattatggcagactgatagccacattttgacgcccacgccataagaagaaaagcaacaatcgtctttcctgagcccacatcgccctgaataagcctctgcatcacataaggacttttaatatccagctttatctcatctatcgtcttcttctgcgcgcctgtcagctcatacggaagcttctcaatcagtccgtctataaaagcatcatccgtaaactcaaactcatttttgtccttctgctgctttttattctgataccgcatgcccatgataaagagaaaaaactcatcaaaaacaagccgtcttcttgcctccacaagagcgccaaagtcatcagggaaatgaatctgcttcatggcataattatactcgcaaaagctgtatctgtgccttatatccttaggcaggtaatctgacagcagtgtatcatgtgacagagtctcctttatcgtcttcactatcagattgtttgtcacaccgcttgtcacggaatacacaggctgcagtgtatcgcgtatagcctcgtacttttgcacctcatacaccacaggctgctccatgacatatctgccgccctttggcttaatatgtccgtaaaatataagatgtctcccctgcacaagctgcgccttaagatatggcatacggtaccataccagctgtatcatatgcccgggcgagccgatatcctgcaatgtaatctgcattctcgctgtatttttcacaacaggtgcctttttaatcacagcatggatggcataggtgctgctctcatttacattattcagttcatcaatatccgttatttccggaaactttacataatcccggggaaaatgaaggagtatatcaccaacggtgtatactcccattttagcaaatgctttttgtgttttttccccgattcccttaaccgaggtaatcggtgaagctatgtccatatttgctcctaaatataataaatgtcatttatattctttaaagggctttactctacagaaataacataatagtagattggctgtccgccatcgttgacctcaacctctacatcaggatatttctcttcgattgctgccgcaagctcattagctgagtcctcatcagaatcacttccgaaatagatgctgacaatcgctgaatcctcatctaccatggcatctaccatctcaagtgtggtagcctttaagtctgttccaacagaaaggatgctcttgtctccgattcccatgaagtcgttctgcttgatggtttttccgtcaatctcagtatcacggactgcatatgtcacctgtcctgtcttgacattttctatctcagccatcatctgctctttattctcctcggcactgtggtcaggtatataatttacaagcgctgtgataccctgcgggatagtctttgtagggataacaataatctgtttatcctcaacaaggtctactgcctggtttgcagccatgatgatattcttgttgtttggcaggataaatactgtctttgcatttacatgctcgatagcgttaagcatatcctctgtgctagggttcattgtctgaccaccctctatgagatagtccactccaaggcctctaaacacttcattcatgccttctccgattgaaacagatacaaagcccatttcctttgcaggcatgttatttgtcttttcatcagcctgagcagcttcataagcctcttcctcagccttctgctgtgctgcaagcttctgtgaatccttgatgagcttttcctgatgctcctcacgcatattgtcgatctttatcttgctgagtgagccgaaggtaagtgccttctgcagtgcaagtccagggtcgtttgtatgtacgtgagtctttacgatctcatcgtcagctacaacgactatagagtcaccgattgactcgaggaatgccttgtatgcgtgctcctcattgtctgacattggcgcattgagtacaataataaactctgtgcagtaaccaaacttaatctctgcctctgtctcagccgaaatctttgcaggagctgctcctgttggtgcgccctcaattgtataatcaatctccttgccgataagagcatcatatgctccctttaatacctgaacaagtccctgtccacctgaatcaacaacacctgcctgctttaatactggaagcatctccggtgtctggtcaagcacatactcagcctgctttataacctcttcaacaaatgtgacaacatcctctgtttcgtctgacagctccagagccttttctgctgcgccctttgccactgtaaggatagttccctcctttggcttcataactgccttgtaagctgtctcaaccgccttctggcatgcctcacaaagaatagtgacatctatctcatcgtattcctttataaccttgcagaagcctctgaaaagctgtgataagataacacccgagtttcctctggcacctcttaaagagcctgatgaaatagcctttgcaagctctgccatggtaggctctgtgagcgagctgacctccttggccgcagacatgattgtcattgtcatatttgttccggtatcaccatccggtaccgggaatacattcagctcatttatccagtctttctttgaatcaagattcttggctcccgcaagaaacatccttgcaaggagctttgaattaatgcttgtgatctccactttttgtagtcctccttaatcaattacccttacgccctcaacgtaaatattgatctttgcaattttcattcctgtaaatgactcaaccttgtacttaaccgtctcgataagattgtccgaaacagtgccgatcgaaataccatacgctactattacatggaaatcaatcgtaatttcgttgttctcatctacctttacatttattccatggttcaggtaatctctctttaaaagctttacaagaccatccttcatgttgaccgctgccatgcctactattccaaagcactctacagctacagagcctgcataggttgcaataacatctgtatcaattaaaatttgtccatattgggtatccatctgtcccttcataatatatacctccatcatattgtgacgtagctaatgttattataccttttttttcacaaaaagcaaatatttttatattttatccttgcattctttattttaatctgatagaatacatttgttgtgagcttaagagtatggtaagcttagtgaaatgcaaggaggtgcaatatcatggcaaaatgtgcaatttgtgaaaaaggtgttcattatggaaataatgtcagccattctcatagaagatcaaatcatgtttggaagtcaaacattaagaaggtttcttgcaaggtcaatggagttccacagaagttatatgtatgtacttcatgtttaagatctggcaaagttgagagagcttagtctttatttttgaatcttttgaattttaaaggacatccgttaggatgtcctttttatttgctctcatatatgaatattaatcctgcttatcgtcctctttatcgtctacctttacatcgtcgagattaaggtcatcatttttcccctttgagaaacggcttacaatgtccggcaccatatcaagtatcttggtcatgccgtcctgattctttacattgacaagctttgtctgtccattctggataacgagcaccgcacttggctgaatctttccgcccataccgccggctccgttatttttcttttctgccgaaaatgctcctgctgccactccaaacgacacatccacaagcggaagtatgattgtatcccctatatgaatcgcatcaccgaccaccgtctttgtagtgataaagctgtccatccccttgaaaagtgactctactgtgttattgaaactattatctgccataatatcttcctcctatctgcttatcctattatataatctgcggcagtttttatcaaataaaattctaagtgttgccgctaaaatacttattactatcacatgcccctttatatcaaagctgccctttgcatacggcttttcactctcgaaatcgggtgtaatccgccatctgtttgtatagccgacaggaaaacatgctaaaatacctaatgaaatgcctgttgtatccggcgagccggttgaataaaccattgtaagcttaagcctccttgggcatattcttttaagaatgataaaaagttcttttttcagatgtaaaaaagcggctttatttctctcatcactgtattctctttttagcttatagatgcagttttttattttatctgacttatctttaaattgctttttatgtgactttttgtgtggctttttatacgtttttttatgagtgggctttgtttgttgttttatatgctgattctcatcagttactgacctgtactcattatgcgtacgtgctgtgcattcatcctctgcctgttcatctgtgatgtgttctgactcatctgccggtattttaggcccatctccggtgttttcactgattttatcttctgtttcagttttagctgcctcatccatatcgtcatcatccaaagcctcataattatcaaacagcttcttcttcacaaaagcaagccttatatatccgtcagtctcctgtgcatactctatatgcagtgcaaacaaatgaaaaagccacgacacatgtgcttttgctcttatgtctgtattgtcaaagcttccgacagccctgtacttgaccggcacaaacagtacgcaaagcagcgctgtaagtataagagcaagcactacaaggagtatgatgcctatgacctttaaaatcgtaaatatcatctatctatttcctccgtctgctctttaaatagctctttacatctgttttacctgtattttcgtatgtctccttaacaatatcacaggccagcaaaagtgcctcatcataattacccgctactgcgattatgtgcagattcttcttaggatatcccttttgcagcaattctcttgtcggaatgatatccaaaagattttcctcatttgacggaaacgtgatgatgtatgtgtgaagcatgccggcattatgctctatcttccacttgattttctttatctttccggtaacagactctcctacaaataaatcctcataccatttcattccaaaacctcaaaaagcagtttttaaaactgctttttaataatactaataatacttgtgtgtcccccataagttgcttttctttaaatccaggtactcattgtaagccttctcaagtatctgcttctcatttgcaaacttgagcagatgatatgcctcgtgatacttataaaaccctgaatccatgaaatactcttctctttgcggtttactataataactttcgcccatcataagataccagtgtacatccttttccactgtatcatgtggcacggtaaaagaatagtggctcttacccacgtattggattatcgttgcactggcaccagtctcctctttcacttcacggattgcagtgtccttatactcttcatcagattccacagttcccttgggcagtacccacccctcgtacctgttcctgtagttcttgtataagagtaatattttgccacgaaagattaccacaccgccacagctcgttgcttctatcattgccattcctccaagtgtggtttaaacgctatctgtcaattcaagcgaaatatgaacgataacgtctgtcattacacttaagtataacctacttctaaaaaaagtgcaacaagcctattcattgaaatatttatcaaataccttttttgccaccggcaccgcatatgtgcttccggcacccgaatcctccacaactactgcgattgccagatcattgtagccatccttttttccatagcccacaaaccaggcattggtctggtctgtagaatctgatacctgggcagttccggtctttccaaaggcctcatagctctggtctcttagctttgcgcctgttccatcagataccactgctgccataagattctgaagaaaagctgcctgatcctttgacataatctgcttgtatgaagccggtttattctgctccacaagcgccccgctcgcattttccgtatggtctaccagatatggtctcatcagatttccatcattgcagattgcaccggcaatcatgcacatgtgaagcggtgaaacaagcgtgtttccctgacctatcgtggtctgcatggtcagagctgacgaagcattgttatccagtgcaaatttactcttttttgaatcaaaggctatgggcagattcttgttgaaaagcatatcgtcacacaaggtattaagcttattgttgtccaccaaaagacctatattggaaaaggacgagttgcatgactttgcaaacgactttgttaagtcctcctgtccgtgtgatttattgccggcacagtggattgtaaagccgtcctttgtaatactgccgtcacaatcaaagctgtagtcgttgtatgtagacggattttcgttataatactcaagtgctgtaaaaatcttaaacactgagcccggagcatactgtccctgtgttgccctgttgtaaagagaagtgctgccatcaccgtttacgctctcccagtcacttgcgatggtatttgggtcataatcaggctttgacaccataactgcaatctttcctgttttcggctcaattgcaatgacagccccttcgtaatctccaagagcattgtatgcagccgcctgtgcttcgtaatccagtgtggttatgacattatcaccggtatttttcttgccgcttatatcatttactatctggtcaaggaaaaactcatgtgagcgaagcaatgagaaattttcctgcttttcaagccctgccttaccgtttacggcaaagcctgccacatgcgcaaacaccctgccgtcagggtattcccttgtctcagacgcatccgagcctacctttgtccgtgctatgacatgtccatccttagtctgtatctcgcccctcactacgttctttgagaaaagatcctgcagcgaattgtatggactgttgatgaattcgtcgctttttacaaactggaaatataagaaataacctatcaatccaacaaaaactataaggaaaaaatatgtaacaaccgcatactctctatttctgtgtcttcgtgctgtttttgccgcctgctgccggttttctccttctctgttgacttccctgcgcccccggctctttagctgtctgcttttgtctgttttttgtctcatggtcctttcgtctcttgtcatctatatttctccttttttcaggggctgcctgcataatatacatgccctgtatcattccaaaaataatcatcgtagatagaagcgagctgccaccgtagctcacaagcggcagcgtcacaccggtcatcggtataaacttggttgagccgccaacagttaaaagcacctgaagcgcatacacactgccaagtcccaacgccacatacttgtaaaacgcatccttcatctgcatggaaagattaaatatcataagaaagcagctgacacaaaccataatgaggcagacagcaaatataccgcccatctcctctgagatagccgctatgataaagtctttagacacaataggtatcttgtttggcagtccctgccccagtccaaagccaaacagtccgcctgtacctatggcaaagagcgactgacacacctgatagccggccttgtctatgacagaaagaggatcaagccatgcaacaattctgttcttcacatgtgaaaacagatgatagcctgcgtacattccaagcccaacaaacgcaagacctccggcaaaaatataaaacctttttgtcgcaacataaatcatgaccagatatgtaaagaaatacaaaagcgctccaccgaggtcgtttgatgcaacaagtatcagcacaaacactgccgatacgccgcttgttatggcaagctgctttaaatcagttgatttatacagcatggatgctataaaaaacacaaaaagtatctttacaaactcagacggctgaattgaaacaggaccaaatgtcaaagaaagctttgctcctctgctcgccactcctaccacaagcactgacaaaagaccaagtattcccacaccggcatatgtccatgtcaattttcgaaacatcgtgcctttttgcatgataagcggtattaaaaacgcaaatatcgttccggcaagtacaaaaacaaactgccttaatgccttgtcaaacgaaattctcgttagaataatcatgcttatacaaagcatcatcaccatattgtttagcacaagctctgaggcattcttataaaacttatgataaatcagataaattgattcaaaaagcacaagctgtgctatataaaatcctattatctttgtatccattgtcgtgacaaagagcaccaaaaaaccatctaaatgaatcagaaacatataaaatctctgcagattatatatatgcctctgctttttcggcttgtcgggatacttgaataaatgaaagcataaaaaagtatatatgagaaaaagtattatcataatatacttggaaagctgtactatcagatgtaccatgttattctactcctcttttgtaatgtccgtttgtatattcagctaccttatcatccataaccgccttaatctgctttgtagtctcgattgtaaagctgtatctaaaacttctgatacctgcctccttaagcttacttatgttctttgtgagcatggtaggcagtgaattatatattgtattatagcactccttacagttgttacaaactgcaaaggatttattgtatctgtcctttaaatatataagcttttgctttttatcacagccctttgtgtttttgtgcacacaattggcggtggtcataagcggataatatccatagactatcatctgcgagcctatattatttctatgcataatctcctttgaattgagctcaagcgacactgtgtcaccacttactccgtgctcaaaaaatgcgctctttgaaacatcattaaaggtatacatattgtggtctaaaataacttttttccctgtaaacagattttctgtcagataaagctcctcatagtttttcaccacaaagccctcgaagcttaccttatcaagctcttttgcgatagatacaaaataatccgatgaatccgcccttaatatcgtaggcagcatgagatacacttttttatttcgctttgtaaggcttttcacatcatctgcaaactgctgtatcagagtcttcctgtcatacatgtcaaaatccagataaaatacatcaaaacattcatagccaataagtgtatcaagctgcgcgcgtgtcatacacgagcatatggtggtgtaatcatttatagcttcatcatgtgctgcatcactttttacgacatgctcagggagtgctgtaagtcttgacatatcagcgtatcgtgcatcattcctgtaatactttttcaacagcttatcacaaagccctgaaattgcatcacgccgcagcttatttagtgctccgtttggcacaaagacgttttctccgatttgagctttaatatgtgaaaactcaaagtctgtatcaccggttttgtttatcctgtcgatagcggcttttttatcaagcggtgccttaagtgcggcgctgacaggttctattgatgctttgtatgtcacatcacctctttttacagtgaggcttccgggctcgccctctcttaaaacaagctctccctctatcgagagctttcttttttcaggcaaaggctctgtagcatttgaaacgaaattaggcttcacataagtcaccatatcagagccattgtggtcgaaataatacctgtcagtgaaaccacagcggtttccaagtgcctttatcctgtcataatcagcatcactaacaggctttttgctgtcaatatagtttctgtagtattttaccactccgcatgcatactcaagctgcttcatacgcccctcaatcttgagcgaataaacacctgcatcatgcagcttgtcaagagcctttataccacacatatctttaaggcttaaaatgtattcatcctttttgccctccacggtatacggcagtctgcacggctgtgcacagcggcctctgtttccgcttctaccacctaaaatactgctgaaaaggcactgtccggaatacgaatagcacaatgctccgtgaacaaaggcttcaagctccatgcctgtttcctcatgtatgcgcttcatctcggcaagagaaacctcccttgccatgaccacgcgcgtcactccaaactgtgaaagaaagcgcactccgtcagctcccgttaccgtcatctgtgtactcgtatgtatctccattgacggaaaatactcatggatagccttcaccactccaatatcctgcactatcactgcatcaagtcctcttttgtagtatggaagcaggtagtcgtagagctttgaaaactcactgtttttaatcagcgtattgaccgtcagatacacctttactcctcgtaaatgcgcaaaatcaattgcctctaaaagctcctcttctgtgaaattattggcatatgccctggctccaaacatgcttccgcccacatacacagcatcggcgccgctttctatcacacccttaagtatctcaaggcttcctgccggtgcaagcagttcaaaatctttatttctcatatatttcctcatatagatgctcattttatattatataaacctgcaataaaatagggaacagtgtacgataactgttccccttttattgctatttatcgctactgtcatttgccccattggaagcatgtgcagattttttaacaggcttttttccatcaagaagcgactcctcaagtgttgcctcaagtctcgccttgttgagtaaaagctccttgttttgtgcctcaagctccttcatgcttgcctcagcattctcagtcttcacctgattggaaattaaatcatgctttaaatcgtatatttccttatccttattctctatatcaccctcgagcttttcgacaagtgcctttgccttgaaataatcatccgcaatattgagctcgataagtgtgctcttcatattgcccggaagatgcttatactcatccatatcatcaaactctgcaatcttgttgttgatgtatgccgcaaccttctgtaagtattcctcattctcatatcctgacagtgtgtaaacctttccgtctattaccacctcggcatttgtttttgcagacatttaatcatcctccgttttcacatttattcaaaccagctatattaatatcaatttcaatatcaaatacttaattattatatgccttatagatataaattgcaactttaagccctttttctctcaaaatgctcaaaggcaaggtctgtcgccacacgtccctttggtgtgcggtttatgaagccgttcttcaccagatacggctcgtaaacatcctcaatggttccggcatcctcacctattgccgctgcaagcgtatcaagacctaccggtcctcccgcaaacttgtcaatgatggtgagaagtatatttctgtcgtttaaatccagtccgtacttgtccacctccaaaagatccagtgcaaagcttgccacatcataggtgattttgccgtcatacttaacctgcgcaaaatccctgacacgctttagcagtctgtttgcaagtcttggcgtgcctcttgagcgtcttgccatctcgtaggctcccttgtcatctatctcaactccaagcacctttgcggaattgacgataatatgctttagctcatcgacagtataaaactccatgtgatttaccacgccaaacctgtcccgaagaggcgctgacagcatacccgccctcgttgttgcccctacaagtgtgaatttgggcaggttaaatctgattgactttgcagactcgccctttccaatcatgatatcaatggcgtaatcctccatggcaggatagagcacctcctccacctgacggtttagtctgtgaatctcatcgacaaacagtatatctccctcagaaagtccgttgagtatggctgccatctctcccggcttacctattgcaggaccggaggtcacctttatctttgtacccatctcatttgcaatgattcctgcaagtgttgtctttccaagccccggaggtccgtaaaacagcacatgatcaagcgcctcgccccttgattttgcggcttcaatatatatttttaaattgtcctttatcttctgctgaccgatatagtcatcaaaatacataggacgcagggatttctctatctttatgtcctcttcctgcaattgtgtggaaattactcttttcacgttttgttccccgtttctgttttaagcttacagcttttatcaatcaacccatatttttgagcgcaagcttcagcacatcctctacatccatatcctctgtgatatcaaccttggacactgccttaagactctcagtagacgaatatccaagcgcattgagcgccatgacagcatcatttttcacagagctgttcatggatacagcagcaccggatgcctggttctcaagcttcttttcaaatgcatcctcaagcgacagcttgtcctttaaatcaagtatcactctctgagccgtctttgcacctattcccggtgcctttgatatagcctttgaatcgcccgatagaatcgcaaaacgcaaatcatcggcaggcagagttgacagaatcgcaagacctccctttggtccgattccgctgactgtaatcagcagcttaaagatttcaagatcatccttgctcaaaaaaccgtaaagtatcatggcatcctccctgacacataggtaggtgtaaatttttacatcctctccctcgtcaggcaacatatcaaaatactgcgtcggtatgtaaatgagatagcctacacctgctgcctccactacaatgctgtctatatttttttctgcaagctctccttttatatatgcatacattgaatccatttgttactgtttcgactgcagcctgacacacaggcataaaacagcagcatctccttttgttattaaatatacgtagattacagcccattaaaactatacatggaaactgtcagaaatccttaaaagcacctgtgaagctactattccaatcacaagtcccgtgatgcatcctgccacaagaagcaccggaatatagtacactacgctgtaggttgacaaaactatagccgcaactattatctgtcctatattgtgacacactccaccgaccaggcttattgaaaccgagttgaatttatctgatttctttagcaggtacataacgataaagcttagtatacagcctgccagtgaatatatgatgctgaacgcatttccaaacataaagcctgaaagcaccgcacgaaatacacatagcagaaacgtctccatgggtgctgctatataaagcatgattactgtcactatatttgtaagcccaagcttcactcccggtatgcctaccgcaaacggtataagtgactcaacatagcttagcaccagtgccagtgccataagcataccaagatatgcaatctttctggttttcatttatctcattctttctataaaaatgttcgggtatcacttggatatcgaatctatatctgatttcgtgtcgctttttaccgtcacaacaaccttattcggcagacagataatcgactctccctcctttgatatcgccttctgcttcacacacagatgatccggacagtcggcagaggtcatatccgccacaccgccctttatgacaagggtgttagtaacatcgccatcgccgttttttatctcaattgtatcatcctttgaaagcggatatgtgccataggcccttccatcgatagtcacctcgacacatgcatcgctatccgtatcctgcccctttaaatatacaagcttccatacaagaagcagagcgacagagataattacaataaccgatatcaggattatatcatttctgccaaaacgcttacgcatcctcttttatctctcccatatagtaaaagcctctgcactcatcaagcttcacattataaatatttccaatcatatcctcggtacccggaaaatgtacgattgaattattgtccatacgtccggtcacatagccgtccttctggtcatccatttcctctgcaagcaccggcaccactttaccctcatagcattttgccttttctgatgagatagtctgaacctcctttaagagcctgtcgaacctgtccttgaccacatcatcaggcacctgattctccatggtagctgcgcgtgtgcctgttctctttgagtaaataaatgtaaaagcactgtcatatctgacctgcttaacaacatccattgtctcaaggaaatcctcctcagtctctcccgggaagcctacaatgatatcagttgtgattgcaatatcaggaatctgctcacgaagtctctttacctcgtcgagatatttttccttgtcatagtgcctgttcatctccttaagcacccttgagcttcctgactgaagcggcagatgcatatgcttgcacaccttatcgcactcctttatcgccataatcaggtcatctgataaatcctttggatgagatgtcataaaacgaatcctcttaagtccatcaatcttattgacctctcgaagaagctctgcaaaggttataggattgtcaagagttttaccgtatgagttgacattctgtccgagaagcattatctcgcacactccgtctgcaacaagcttttctatctctcttatgatatccttaggctccctgcttctctcacgtcctctcacatatggcacaatacagtagctgcagaaattgttgcagccaaacatgatattgacacctgatttgaaagagaactttctcttcaccggcagatcttcgacaatctgattggtatccttccatatgtcaatcacctgtgagcctgactcgatattgttgcacaaaatctctgcaaacttgaatatattgtgggttccgaatacgatatctacaaacttatagtgctttttgatattttcaacaacctccggctcctgcatcatgcagccgcagagagcaatcttcataaaaggattctttttcttgtagttctgcagatatccaagcctgccatacaccttgttgttagcattctcacgtacggtacaggtgttgtatacaataaaatccgagtgctcatcagttccttccacgtagcctatctgctctagtattccgacaagtttttctgagtcgcgggcattcatctgacacccgaaggtctttaaaaacaaggttagtggtcttcccagttcttcggactttttcttgacatactgcctagcctttgccatgtagtagtactgtctctcaggctcgtgggttggcggtgtctgggtgatatctatgtcatctaagttaatcatgtgtttttcctctcttaattaatctcatgtgagtatagcacattcattcgatgttttgcaacaaatcattgtcaatcagacaattaatgtattcattcacgctcatgcctctcttggaggcagcgcttttgattttttctttttttcccgctttcattgtcaggttgattctatcatatttttctttgatatatttattaatgtactggttttgattaaactcactcatattatttgttcctcttttcgtttacgatgtatattataactaagatgtcgaatattatctgactaactaaaaataatgtttccattttactacctccattgactttttcgtattttcgtagtaagttgagagtgtggggagctttccgctccccttttactcaactgtttgttggttacttgttgagtattaagtttagcaattgtaaaacgcttattatcagatttataattgctgtggcaagaatgatgttttgaagggcttcattcttgccttttttcttttgtcgtttctttttcttactcacttgtcttacctccttacatgattataatatcacattatgcgcataatgtcaatagtattttgcgcataatgttattttaaaataaaaaaataggacatccatcaatctgacagatgccctatgttataataattatttaatttgttgagtcggtcggcagctcattggtatactttgatagtgcctttttaactgtgcgccacacctttttgactggtaaaccgcacaatgacatattcttcaatatgcttacaatctcatacgctatatatagtaatgcgaaaaactccatcgttccgactgtctgtcccggaagatatgttcttgcaccggccgggatgaatccgatgaggttcaatcttatgattgagtcgaccagagccaggagcacaagagaaatcaacataccgacctttctgattgctccattgattccaaagtttgaattgaactttttttccttgattgctcgtaatactccgaagatagtgtccgtcactatgcatattactactatctccataattttgttgcttgctgttgccgtaaaaaatcttataatatcattcatcatttttttcttatcctttcaagagtctgtatgttgtgagtaatccgacatatgcatcctgtgtcagtcctctgttcttttggaataccttcacgcatttagagagatagctcgtccacttgccgtaatccgtgtctaactttgtgaagctgtatacatcgtgcagcgttcttcttaaccacttgattgcagtcgggcaatggtgtttctgtccactccacagattgtggttttttgcgaatgcctgtgagtcagctccgaatttgccgtcctctttcagtgcatcatctcctttaaggtcaaagcctacgttcatggcgtgctgccattttctgacttcttcactttccaagtaatagttaacattacccttccagctctcatcgctcggcttggccggtgcgggtgcaggctggcttgttgctgttgtatcttttgctccaagctccacatataagaggttggcatctgtgctgttattgagtccggagcaagtgaatgcactggtgtactgccatccatacaggctgtgtacaatggcaggcttcttggcatcgttcggatcgtccccgattgtcattcccttagttgatggataacgcgcgatccagaatggacagttaatctgattagcatatggcagaatataggtattgtagaagcttagcccggtgtacactccaaaatcaaggcggcagggcttgatttctgactgatatgtgttgatgatgtcgattaaggtctgtccaagtccctgctggcatctgtcctctacatcaagccatacgaatgtctttcttccggcaagtacctcaatcactctctgtgcatccgtctttgccttttctactgtagtggcgtacgaataattatatacgccctgaatcggcattccggcttctgtgcagcccttccagttctgctcgaaggtcttgtccgggtttagatcctttctgataattttcaaaacagcaaactgtaccccagcccatttaactttgccccagtctattgtgccctggtatgatgatacgtcaattcctttcatgatgtctctcctttcgttctgtgcatttgtattaatgttgttcataagcttgcgcccctttctttatattataagagccggcacctcatttggtgtcggctcctaggctctatttgttagttacatattaaattttatattttctatctcgctccctaaccagagtttaagtagcttaacaaatggcaaaataactattaaaaatgatattatgggaacaatgattggtaagatatgttttatatattacaaacatattatcagtggtgttgtaaaaaataaggaatatttcctagaaaatgtaactaatctcggattaccattgccattaatgaagcctgatttcccgactttaacatctccaatgtttatggtggctggtgattggagtacccctactgccgcaatagccgcattacaattaaaagctgatggtacattatcatgggtatcatcacatggacatacagaatctcttacttacatgggattcattgcatatattgcaaaataattattagtcatgataaaatagtatataatttactctaatattacaactagcggttactttatctttccatacgacatagataccagttgttgtgattgttggcgattcaagatgccctgaaaatgctgcaccatcaccgtttgtaattgatacacaaagattatcgaaattgaatgttgatgaagataatcctagtgcagaaataacatcattttttgacaatagtaaacatgagttatttcccggtaaaatttcaagtattttggtacccatcttcatgatggaaatattccctaaactatttaatttattaagatctgtctttagattacctaaactctggtttaatgcacttatagctccagtacacgttccatcccctatcttggatatgtccgtttttcctatccgctttgtgataaaatactttaatcctgtaagatccaaatattttgccattttttctccttctttctatgcaaatgccgcatctatttcactattggttattgcaaccatatccgactgctttatatagctgcttaggtcaatttctcttgtacctaatttttcatacttattgttaatccataaatattcatcatacacattctgtcctcttccagaattggcaattaaataaaacgttcccttaacgcctgttgatggcaatgtctgcactacttgaaaatccaatttagtaataccggccatcgctgttgaaatggccgatgttacaaatgctgttgatgcggcctgagtattatttgtaccagctgatgctgttggcactttaggtgtaccagtaaaagacggactcgctataggtgctttcttagttagctcagcctgtactgccttgttttgtaccgggtttgttgaagtgctactcagttcactatctactgttgtcttatttgcaccttccgctattccatcaagctttttcttatcacttactgacataagaccatgtgcagtctgtgttgcatcagaataagttgtatttgtcggtgctccatatgtaccatcccctcgtaaatactttccataatcgccagctgccggtgcaggtaccaatcctgacgttccagctgctgaagctgttgcacctttcataacagcatacgttgtattttctttcggtggtgtatatccaagtgcttttattacattatcacttgtaagctctcctctgatagtttgtgatgatttgttttcaacattgcctaatccgatttcttcctttgaatgtgtgtgtcctttatcacttttatcttccaatagagttttaattttactaatgatgtataccgcacctgtaagatttaaatatttattttccatagttctcctttctgttatctaaagtccattaaatatagcctctatttcttcaatggtaatagcattatcattattaactgcattcacctcctccggggtgtatgatggtttgttttgtgctttagcccattctggtatggttggatctgtctcatacatatctcctgatatttcttttccattcaagcggggtttgttttttagctgttcataatcatccattatgtatatttgctcacattcaattcttaattcagtatcattttccatttcaagttcaatttctgtcatatcatcccctctttcaatatatcttcaactggtactgacttgatattgcttgcaattacattttcatcttttgtctttgccctgacctgtatcaatacattcttcatagcatcaagctgcagtgtttcatcttgagataatttaataaataatgtttcatccgaagtattcaattgatccatggacttctcaaactcatattttccctgtttaaaggttacatatattttttccaaattatttatatcacaaccttttaattttattttgattgttggagttgttcctcttctcatacttcacctcttgtctcaaaacttatattgcatcaatttccttggtacttatagtttctattttatctactttttgattgacactttcaatttgttttctaacagcctcccccgctgtatcgtatgactctcctgcaaatccttttctcacatccttaagctctgcttcgtagttgccaaatctttttaacaattgttccacaagtgtagtctgcttttcctcttcctcatcaccaaatctcatttttccagtacatttaacaattatgttgaacgatatcagcttactgtcaccatctatcactctgatctgcataacattctgccctgcatgaaaaaatgactcagaaggaataatcgtaatcgtatttccatccacttctgccaaggctttattaggctcagccatagttcttgtacacatactgtacacaactgctgccgctgtacccggaatagtgtaatcctttatatcaaactctaatgcgattgaatttgtgccctcagttacctctattggagcctgaagcacattctttgtaacatatatgtctcttttgatagtctgcattcaaatatctcctttcctatgcaggaataaatctaactatatatcttccagccggttctacacctgactcaaggaaatcataccaggatctcgcatattgtcttcgtgcttcttcctcttccacaccggctctctcaaagttcttgaggtaagctgaagcaagatactccggtgtctctgtacttgttttaaattgagaccatgtcagattatacgcagatgttttaatccattcacctgtagattctgataactgatcaatccaatataactgtactgttccatctcctatatcgtatccgttagcctttgcccaatttgtatatttggttgccggagtccactgcaccagtccatagccaccggaatagttgccctctttaaggctttgccacaatccaggattaatggttgattctctctgcatatttccaagcaggcctgagattgcattgattgtccagcctttatcacttagatatgtataaatttctttggcattgctctccatctctccctgcgtcaaatatttattattactaatcatggataagcaccctctttcgattttcctcctataagcaggcctccaacataattctcataagttccatccgaatactctactgttccggtaaatccgttatatccgtttacaccgaatgactggcaatcaacatatacctcgccagtcttaaacattctaaataatgcattttcagtaccgattttaaaaatttcattacttactgcaaaaattctcccgacagtattaccacttttgtccatgatcttcatctccccctctgagatctctactcttcggccaaattcatcacttccacaagtgtatttaccatttgtcagtattccatctttatccatgatagttaggatagctccattaccatctaatacttttataatgcctgctatgttgtctattccgccaatggtcaatgttcctccatatatcctgtctgccagcatggttccggctataatatagtcggcaaaaaagcctttcccggttccgaatgtactccatatccagtcttttccatcagcggtccttttggatgcaatctcaaatcccattgatccaaggcacatagctccgaacgtaggtgaatcagggtttaaatcctcaaaaagcatggctcgtacatcctgcttttgagctacatcacgtagtgcatgaaactgtgttttcactgcatccagtattccctgcacctgagagccgatcacagatccatcttctctgattgcgctctcaattcggttattaatactgacctgatttgatatgtaatcaaattgataatcgcccagcgatacagataatatgcggtcattcacacaatcccactctaattccgtaactcttgcatctgtaactatatcaagattattgtttctacaatgtacggtatcaccaagagacacttctacaagccccttgacatcggcatacagctctgtatcctcaatcattaccatatccacagatatagttacttgaggcttgtctgcccccgcttcccactgttcctgacagcgttttctaagtgcagcctccagttgtgccggtgtatcgcatatgatcacacctttcgattcatcatcttcctgtgcatcagctctcatttttacatcttcaaatttcattgttgaatatttgactgttggatatttgtctataagaggggaatcaacccaaggagcatccccatctatctgatatccgttatatgcctgtggaatgatccgggtaaccacatttcttaggtcaacctcctctttcattccgttctcagcaatgttttttccgtaaaggatctcaacacctctttcgctgccagcatgacgatttattatcgctttgtaattatcatatacgatttcaccgccccatctcttaacaaaagaattctcatcgtcaccattgatggcttcgatgagatttttattttggtaatatgcagttccagtcgatgtaatatctgtttcggctgtatactttttattcggtgcagtcatgatatcaagagcctgctgccctgttttgtcagttggacggacatccaaaaggaaacaatcatctgccgcatccataaatataggctgcagatcagcagatattcctgaatcacttttttccttatgagttattctgaaaagctgctctccattaaaggaaggcatcttaacaactgctccctctttaatatacttccagcggtcttctgaatcctttggatgttcaagcgttacctcccatattccattcaatacggcatgaacggatgcacttgaaggaaataatgacatatctccgttctgatcaaagtttgtattttcaatgttatatatctggatcataagcacctccaattaggtatcactttcagatttcctccgtaaaattcaatcttgttgtttcccggctgtagatacatatcttcataatttcctgacactttggtattattcaaagtaccatcctcgcgatacgcgatcatccgatctgtatctatggtcagattttgaccaacattagcagtcatcgtttttccattgatcttaagcgtacacataccttctgctgcgatcttatatgtcggatgacactctatataaggattccagcaaacatcttctatgtcatattccattgcaccatctacggaatattggagcccatccagtgtgtgaaatatcgctgtaaaattgcctatccgctcagatgtcctctcattatcatctaattcaacataggttattttataaaaaaagcctgcatcatcagatataataagttttgcatttctttctgacagccactgttttgccattctccagcgatcattccacctgtctactgctccgatataattaaatggtatctttattggtgttgctgcatatgtaccattaaacttgtatatggttccatcccgccctgatagttttacctcttccatattcggctgagcggcaggaatagatatcaactcccgggcaaaaatctgaagcgaagagcctcttatgtcattgtattgtatgtcctgcattattttcctttcgccccctgtgttgctaatgtcttatttgccatctgcttaagaacgagatttgtaagtaatgtgatcgacttcttatctccaatataaatgttattctccgcagtcattgatattgatttgaatgcttcaacgatcattgcggccaatgttgcattatttgcatcattttcttctctgatgtagtcctttaacagtttaattggaagtaccgcctcttttccagcctctccccctcccatcagggaatctccatttgcaccaaatatggtcggactattcaggattcctccatttgcataccaatctacagaaattttaggtaccttaagtggggaaagtgaccactctccactcgctttaaaatgaggcaactttatttttggtaatttccaatcaaaatcgaagaatcctttaatcttatcaatagctcccttgataaaatcggctacagctccgaatatggcatttacaccatctctgaaccattcacacttattataaagcgttacaaaaatggctataagtgccgcaactgccgcaataattataagtattggattagcggccatgactgcatttactgctgcaaaaccagtttttataggtcccaatacaggtgcaattttagatataatgccaattagcgacgaaacccctcctgataccttgcttatgatagaaatcacagggccaactgatgctgcaagaagagcacatttgatgatcatattctgtgtttctggtgacaatgaattccatgaattgataatgtccttaagaatcggtgttactgtctgaagacattgtgctagtattggtcctaatgcattgccaagttcaaacccttcatcctttaactgatttaatgtgagtttgaactgatctgccgggtccaacgttgcattaaatgtatcactgacacttccaacattgtcattcaatgatttgcctagctcttcaaaattcagttttccttcctggcagaattgtgccagtgccggtcctgcttttgaaccaaacaaatcaatggcagcattgtatgcttctgttgaattattcgcgcctgacattgtgctttgcaaatctgacaaagcctgtttcatagatttgccttctccggatgcattaacaagagctttttttaggccagccatcaccgtacttgtatcaacacctgacgtctcacactgttggtgtaccaacgcattattgctgatgctccaaaattaatcatgccctgactgaacatggattggataaatggtgcaattattccggttgctgatgtaatcttccggatcaaccggactacaccgttcggattcttacgatcctcaatcgtaatgccccgttcctcgaataccatcttaaacagagtgtaacggtatgtatccattgctatcttcttgacatcatattcagcacatctttccatacaccaatcaactatgctattcacatcgattacaggtcccggtaccacctcgaaatcattaaattcggtctgccctatgttcttaagcgggaacttgatggagtctaaaaaaggcgattcagcacaaatccatgtgtgctgtcgccatatatattctcctgattcggtttttgtcaaaactcccgccgatgcaaagtcccttatatcggcataatcgattccaattacagccggctgcccttttgtatcgattgtcattcttggctttttcagttcaaattcctctgtcgtgctgccctcgtaacatgcacgcagtacattcagccatgttgtgaccgttttctcttcctttcgtgccgatctgtccattcgttttgtaataaattccggtctctttgacggtatctttttcatttcaagataatcgtgcattatctgattggccagaatcggcatatactccattgatgggttggctttgtgccatgcatcaggaatatcaacttctttcatgctgtcaatttcgcaaatgaatggataatatcccagtggattttcaccagtctcaaggatttcagcgcacattgatgaaatctcatccaacggaccatctctgacgtagccgtctgtggtgataataaactctctggaatgtttgacttttccgaatgaagactcaaacacatttatctgatcataattctcgtaagcatgaatctcattgagcaccaagcatccggttctcttgccgtccttggttttggcatttgaagtgttatatttcatttcagagcctgttgcaaggttcgtaatcagctcctttgttactgaaaattttcctttgaactttgcattttcgtggagcatgtcataggcaaccttaaaagtgtccttgacctgatcttctgagttggccacaatctcaacatgataatttctgacaccatacagaggtgtctgcataaaatttgccaagggaacaatgaagccgtcctttccatttccacgtccttctttgatgaaaaactttgggaataccggaatatcgtctttgtacatgaatacaaacgcatatataaacttctggtatggaaatagctcataataatttactttgcagtattcgagacaattctcataggtctttttatcgaaaaaaatatcattccgcctaagtaatggctttacaatgttcttgataagctgttttcgctttttatttatccactgcggatgttctttgacatatttgagataatcatcaatttccttacagataaccatctgttgctttttccggttcaggtaccggatccttaagtctcagatcagctaaaatcttgagcatagttgctgttgttttttgcagattgacaacagaatcatttgttttctcgacttcaactccgtttccgttaatggtcttgtatctgagccctttggacttgatatcactaatcagcttctttttcagtgaccagtaatatacataatcgtcaatcatgtctttgtaaaactctgcattcattccccgaagctccaactgcttgaccagagaatctcttatttccgtttttgtcaatccgctcacctccctttttctcaaaatatgtctgttttttgtgtataatttgcatattttttaacggtttttattaaaaaaataactgtatttttgtgttcttcaaaaaaattcttcttaaagtaattttgtgaaatggtaccccttgcccttttcacgcgagatttcaaaatttttccggagtcatgcccacatgcccgttcgccattcaagaaaatttcgcaaaaattgaccgggggggtattaccaacgctcccggctcacaagtttcttttttcttttgaacttttgaggcactctgccatgtctgatgttgtgacaacgaacgcacagactaataagattgtcattatccagtgcaagctccggatgctccttcagttcctgtatgtgatgtacctgctccgcccttgctatcttcttttctttctcaggcagccattttccttttgccacagccttttggattcttgccctgcagtcctgacactcaaagcgatcccgctttaatatctctattcttttggtttgccatgccttactgtcataaaacttctttgcttctgtatctgtcattattccaaaataaaaaggaccggcccttttgccaatcctttatgcttacactatatcacacatcaaacggacaaaacggacaactttatttattttctttctgagactgctgcagatatctgtcatgttgctttcgcgcgctctcggctgtaatgcctatcttctgtgccactgtgttccaagaatagcacctgacatgacgatacaacataatctgtcgaacgactgtgtcgtctattgatataatccatgagataattctgtcctgctgctgattgagctttctcttcttggcttcaatcagctctcttacactcacagccttaattgccaagtctgccatctggtcactgcttccagttcccggagtgaatggcaagcctgtaatctgcattgcttttccttctgctttgctttcaatcagctccagttgttcttcccacatcttgatttcttttttgatataatatacgcttgttaattctttcttcgtcatttgtcactcctcaattccgaaccatgcgagcatagatataaaatgctgcattgataccgttgtacttgacctccgcatccaggaacttgtagcccggatatgctttagtgagttctgtctctaatactgtgtggtctttggccatcctctcaacacgtcgcttcttgaacttgctgtagctctttgtcggctccggtggcttctttaagttccttgagctcacccaccgcttagtaccgtgtggatttcttgatatatattctcctaaacctgtgatgagaaaatcatcattaggtgatattcttcgtgtgtttggtctgtcgcatttcttccagagcgattccagctcgtctctgtccatgccgtctccggtcatgagaatatgaaagtgtggtctcacatacccatcaaatgcgagcacatatatgtacttgatattttccagtccttttctttttctccggtaatttatcttcgcgataaaattcttgatatcttttcttgctctctcttcgtctgccgggagcttgtcatcattccacccgaacgtgcaccataggtcaccttttccaaagttgatattcgcaagtcttatcagataccgccttgcatttttgtcattcagatttctttgagctttgcttgatggtctctttttggtcttcggcatgtcactgagtcttgggtagcttgggtatatccgagcttcaaggagagtggtctgtgactttatgttggtgcacttcgtggtggctgttctgtacaggcagtttaccttgccctctctgaggagcttctcaagcctctcctcctcggtgtcatctatgtattttttgaaagcctcttcgtagtcgtagttgtcgtattttttcatactatgtactcttaaatataaaaatccctcatatgttaatacccattacaaggacgataaagaatttttacctactatattatgttatgggtttactgctgcctttgtgctgctcttatctttctgttatattcggcctgatacagcagctttttgtctgttgtcagaacgactcgtttaagagttgtctcatacttttttaatttttcgcacgtttgttcccattctttccatgtttcttttttcacgctatcttttttcatgatttttcctttctatatatgtagagacacagcctgcttgtgcaagctgtgtatacatgtcttatagtatttgcaggccggtgtgcagtcgatagaatcaaattcacactttttgggttttattggctttatgtcgctcaatgttctgctcttcaactgctgcctccttcggctcatatcccatgcactttattggtctgcttggtttgccgcatttttcataatatttgcaattctgacattcatttctgttcattgtgtttcgtcctatttggttttgtactgatgcaagcgatatatatctaattttgtccatcttggtgagttcagttcttccgaataccagtcaatcatattggggtagtttttttgctccagttcttgtaccatttgtaaagtgcgtaccatgccatgctacttttccttttctttctgaagcttatcgtattccctaagcaataacagccctattacaaactctgttgttccaatcatagtgaacgctaagagcatcccatatactattaaatctattcctgacatattattctcctattctgcttctgaccgaagccattcttcccacttgctgtgttcttctttgcatggtttgtattcacatttttcatttcttttcctgcaataaacataatcgtcatcatttttcgtataacagtgttgacaagttctgcatttttcaaagaagttttcatcttccatcaccgctctccttatccggaagtttggctagtttccacggtgtacacctattgtcactccacgatgttgatccattgttccaaacgtaaactcttccattctcatatttcgcaaaatatcttttagcccacttggaaaaaatattatctcttaccagtattggtgtatcaactgcaacttttgaccagtcaacaggtcttgacagtgtgcttctatcactcaactgctccactactttatccacatcatagtcggttgcctcttcctctctgatattcactatgttctgacagccacaatgtgggcagtcgaatgcctcaaacgtttttggtagttttgccaaggttccaaaagctgctactttctctgtcgctaaatatttttcttctttctttaattcgaattctttttcacatattttgcacttcatattattatcctccgaggtaaagggagctgggtaagggctcccttgtgtataaatggcttacaaatcagtttcgtgatataaataattcgcatgcctggtttctttcgctttcgcaggtgtttcaacctatagctcatagtgtggtgtctctatccaatagaaatccactcctgagaggagtcttaagacctcaagctccggcttgtaggcaggactcgtgaagcatattccgactgccatctcgtcgttgtatgagataagccagtcaccatgcacggcaaaggtgcttggtggattttcgttttcacggcacttgtccgggttgactatggccaagcgtgcatcgttgatgagacgcaccccgcccggtgttttaactaccgacatcatgttatcgttctgcatgattttaatcggtgagattagtgcttcctttgtatcctccgccatgtcccacaggagaggctttctttccgtttcaaactgtgggtcgtgtcctttctggtatgtcatgaactcgcccttttccggtgcaagaccgcatgtcttgattacggtacctaaaaattcctttgtgattttttctttgtcggcttccaccatccatccggtaccgttcaggatgtacatacctttctctgtgaggccaaacttgacgccccacgttttgtaatcagcttttaaaattttttctaattttgcgcaatctataaacattttctacctcctaacttggttctttcccatatcttcaaacgctctggccatgctctccgcaactctttggagcgttttgaacatctctgcaaatgcgtctctcaggccgtttccgattctttcaatatcctccggtatgagattgtatactttcattgccccatttcttccggtgtatacttcgttaccgctgtttttggggaattgtgaccgtggatttttttatactgtttctttgcctgtcgtttgttcattttgttctcggaatcttttgcaggctctcgctcgtccgtttctcacttccgatggtctgagtatcctgcatattcctttcttccctcatctcggcccttttctgatctctttatagttttcacattcttcacaatgtcgtttcttctcgtctatatcctgccttgttagccttgcatactcattcatgattttctgcaatgtacaattctcacactctttttcacatccgttctcacatggcatatctacatagtcaacttcctcagttcctccactcgttaccggatttgtaaacgtgcaatactctcttggcgcatacatatctccgtaaactcttgtcatctttatcatcttgcgtcctccatcggttttccgaaccggtcaactttttcgctgagccatttgcgtagattccatatatttgccagatctgtcactagcaaccggtggctcttgtattcatcagccatatattcagccattccctgctctgacagcctgtccatatactcttttctggtgccatataccgcctctatgacttctgtttcttctgtctgctctctctcggccgtttccggttcagattctgctgtttgattttctgcatctgagctttcattttctccggtttcatcatcctcaacctcctctttttctagtgtttccgtggatttttgcgcgggcgcaatttgttctgcaaggctcttttctcctgtctgttcctcgggcctgtctgcaggctctttattatcttctccgcagtctgtatctctgtcggtggaatcatccttttgctcttctcctgctccaggagccggctcattatctgccacgcttcccgattcagtctcttcgacctcatcagtgccagcttctccaactgctgcattgtcatcctctgactcaggagtttctgctgtagtatgctctcctgtcggctcattttcctgtgtttcatcgtctcctccaaaatggttctgccacgttctggtgcctgctgcatcctcatcaaagatggagctcatacgctgatagaattcccaccatgacatattttttggcgtgtctccaaacttcttgattgtgacgcgattttcgtacatcatcataaagtaaagaccttttttgaatgaacggtttccggccggatttacaatttctgcaaatcggctcattgactcctcatcaaactcgtttgagtacacctcgttgaggatatccttgttctcctcaaagaatttctctatcagctggcttgtgttatctgccacaccttctgtaggctcggtcttgttaaacctcttgagctctcttatgtcctctcttgatgtctcgggctgtaccatctgccggtcagagtcagggagcttgagcatttcctcaagctggcttcttccaaggtccgtatactccggcctcaagtgttctgaatatccgtcaatcgagtattcacggttgatgctcatgaatcggcttgtggtggatgcctcaagtccgtactcagccttagcaaattctgctatgctcttgtagccatcattttcataaagtctttggtcgtcaatctgtctgagtgcatagcctattctcacgaagctctgcttcactcctatgagttcctgcctcagtttttgtttcatctgcacccagtcatctagtgtcatctgcacgtattccatatatcctcctatgctatagccattgccggcatatctgccgtagtcgctgccggcatgcctgctgtcctcagtgttcctgtcacaagcattcgtatgtagctgttgagccacttctgtatgttctcctggtcaggcttcttgtcgtgggctccgtaccactgcagtatgttcggtacttcggaatcaatctcgacagtgacgtactgcatatttggtgtgtccttgaatcttaagaaaagtatgtacgtctctccccgattgtgtttccctaagtagttatctcctccgacacaatgatgaagtactcgcccctctgttactatttcctctgctgactttgccggtctgatgatgtatgtatcatcctcgtagtaatatttatttctcagcttcctatagctgtgtcgaatgttcgggaagcgcgccgcaacatccttcagatgtttgtccagttcttccttgttgacctcttccaccatcttttcgtgggcttcatccaggtcatgcgggaactgatataccgtgttggtcagatcgtagcctctgttttctctcatgctcaggtaatcagcatatgtagaagccatgtgtctgattctgtataccgaccgactgcagcctccgtaatcacagcatgcatatttctttatgcggtttaaaaatttctgcaatgtcatgtatttctttgcgagcgcgacctgtgtgtatgtgagtccggtctctgccagctgctgtacctgttcatctgtccagttctccatgaatctcttttccatctgcaaaacccttagcagtcctatgtctcccttttccttaatgagcagcttgagcttttcctttctgatgccgagaaactcatccggtctcgttgctgtttcatcctcaatgattccatattggcatttgataagcttctcagctactcctatcaggtgcatcttcacaagcatttcaagctgtggtgtacgcatgtagcactcaaggtactcaaccggattgcatgtactcatcaggctgtctgtgtattccttcatagcactgtattgaaacatggtccctgtcatctcatcatatgtctcgggaagtattggcccggaattgattctgatgcttgataaaccatacagattgcagtcatcccagaagtcttttcctacatatggatcatgcttgttgtagtcaacctgtacctttttgccgggttcgaaatatgcccttgccagttcaacccccgacagcttttcataggcattgtacatttcattgccgttctcgccggcaatgaagccgagtgtccactctttttccacctgtatgtacctcataacaaagccattgtctttatatttctggccaagaaacagatactgggtttttctgatgctgccttttacttttcctttgcacttgtactgcccgcgtgcgccacacataggacatgtgccgaagctgttctctcgcggctcttctatgtttctctcaaactggtcctcgtatgctccactgcttttccatcttgcagtggtcacaccgccacacttactgcaggctatgtcagcccggcttccatgcttcttgtaatatagaaagtgctcatcatggaaatacgcatgatcagctctgtacagtattgctttttcaggtagtgccttggtgtttgcctgtctgtccttcagtgcttcctggcgtctcttgcgctctcgctctactctgtttatcctttctgttgatgtgatgtcggcctcgtatcttgatatgtgctcccaccaccaagaagcatcgaaaagcttggtgccgcaaaagttctttatcctctcaaggtcttccgggctctgcagtatattttcatctgtcaggattcccccggtgtgtgtttccatccatattggtctgtaatatgaaacctgctggcgtgtccatacatgtttgtccggccagtatgtgccgaaatccttcttggtgagtgtgattctcaccacaggaatcttctttgactcctttttattttcgtacacctcaaggaacaggtgcctttgatgtcctatgttcttgactgcggtaacaccaatgtacttcacggattttattctgcttatttttttgagtcctaggtatggtattttttctattgtttttttcttcatctgtagtgcctactttcccatgtagtagtcagtgattatcttcttggctcttgccatacccgggatgccgagcgtgactttgctcgctgatacacctgctgccttgatgatatccttgtccaccgtctgctgattcttgaaggaccacatcaggatggcggctatacagcccttcaatgttttgcctttctttctgacgttgtgagctaagagctcattctccatgcactggcctcttaggtactccacccagtcctccataatttctttcggtttaagttctgctgcctcgacatcaatcttgccgagtgccgccgtgagcttatcgcacagctccgggatttctccgttggtgtataggtccacgaaatcagcctgtattccattttcttttgccactaccttgagggattctatatcaccctcgttaagcaggttttcagcgagctcgttaatctcactgaacgaatcaaattctccaaacttatcaaacatatggtttctcctttaaaaaactccatttatcgtattttcgttctgtatctgtaaaatccggataaaacgcatccagatatgctctgaacctgccgagcatctcttttctgtttccactgctgccattgtccatcatatgatggtggtaccggcatccgactgctccgttctgcctgataccaagtcccatggatgagcgtggtatgtagtgcatgatgtctgttatatccatctcagggactgctgtcggtggcatctcatagcctatctggcagaatatgcaccgataattgtcacgctctcttatggcagtacgctctttttgtgaaaattcaagatattttgtatatttaggcatatggatttttcctctttttgtgttataatatttttataattttttcttttagtgttgtttttttatgcagagtccggtcaggaaattagattttcccgaccggtcttttttatgcctcaatctgcataatatatggtgtgttgctctccatgcgctcatccacatcctgaagcatgatatccgtcagctccttgagcgtgtcgaacatgctgtcggtgatgagtctcttgtcgtgtctttccttcactactccgattatgtagccagctgtaagtgcagcttcctttacatctgcgctctcctcaatctttccgatcatgccgatgcacttcttaaattccttgtactgtttcattcctgctgtgtgcttcttaaataatttcatggtttttctctccttatgatgctgctttctgttcttttgccacctctgatgtcatgatgccgatatcaagtggcttctctgccttgatggcagcgtttaactgttctgctgtttcaattccaagttttttgagtgcctctttaagtttgttctccataagtgacctcctaatatacccaaatcctcattccgattctgcttattacttctttgagcttgaaatctgctttctccgtctttatcaccttcctttcgccggaaatcttcttactaagtctcttgctgccatctgaaatgcctgttctctctcgtctcctgtggctctgatgacctcccggccgttctgtaatattttgattatgtgctcaccgtctttttccctcagtgtcattgagagatgataccgcttttgacgaggcgaatacgcactataaaataggtctgtcagtgttttcaatccttttcaatcctttctctcttaaatgctacttgcatatttacttcctacagccgtatactttccttacaggcactgccatgccgagtaaatgaaaggtaatcttgcaaatgaaactaaataatgattgtattcgtgatattcttttaacgctggaggaattatgtacattcgaaaataagttcacctatgatatagagtctcaacctccacatttattagcaaaatactcacgtgaagaagttctctatcacattcgccaatgtgaacattctgccctgatattaaaaccgctttattgctatggtggcgatatagtagaaattagtgatctttcaccatctggacacgaatatcttgctaatatccgttccgacaatatttggaacaagacaaaaaaagttgctggtgaaataggtgctacatcactatccgcaatggttcaaatctctagtcagataatcactgctatcataaaatcacagtttgggcttacataaatcctttatcacatgctctatcacaaatttcttgcactcaaccatctcctcttttgatggctgagtgttcgtcttttgtatgatccatacaatcaacgcatattttgtccacttattttcaagccaccctatcaagcaagttatcaatgctatgatgaatattagtttcaatttttctcacgctccttcctaaatcagatttctctccggtaagcccggatgtattctttattgattcagcatgttcttgacttctgccttgagctcgacaaggcttgcaaggtacgctgcttctgtgaggattttctctctcttgagtttctgatactgttcctcattccagtcctctctcgtgttagtacagaagctgttgtattcttcctctttcttgcagttcatctcatctgctttatctattttctcgaggattttctcgagaatgagcaattcttcctttgtcatggctttttctcctctgcatcttcaaataaagctggtcgatatgtttctttcgcaatatgcttctttgcctcgtacctcgatgtgatacagctttccaactgtgccattgcccgatcaagcgcttcctttttctctttgacattcgccagtcttccgagtagttctttgtccgagacttctatttccagtccgattctcatttgctctccttttcctgcatcctgtccagcaacgtttcccactgcagcactgcagtcttcatctcttttgcatctacaccaaactctcgcatcttctcttccattggtaccggctcatggtctttcttggggtactgctgatatatgctctctgcagcatggattccgtaccggtaatagcatttcactgccagctccggtgtaatgattccttttccctgtacagtgcacctgctcttgtccttgtaggtaaaaaatattttccacatggtcttttcctttcttaaatgctacttgcatatttgctctcccaagtcatataatctccttacaggacgttgtagcgcccgagtttacgaaaggaggactttataatgagtaataatgatttatcattgatagaaaaatttaagtctttaatgcaacaagctatgttatatgctcaatactctcacgattatatttttgatgattctgttgaggattctgtcgctattgcatatctgaatatcgcagcttcaaaattcgctgcggcagaatctctttactattcatgctttaacattttggaacgtgatgaagctgaaagtatttttcacatttttgacgtatatatggctgaaatgttgactaatcataagactgagcactctcatcaatggacagatatcgagtacaatcgcttaaaggatactttcgattcttcagcgtttgcattttaagatttctaatttttctaaggggaggttttttcctcctcttatctcgtctaatatttcatgcagtagtgcggtctggtacattatttcctttcctataacagaatccggatctatgcataccgcctttcttttcttttttgctttttctctcttgatttcatctctttgcatttctgcaaacttcgaaatttctttataaatttgatttcccatatggttttctcccttcttgtgcttaacatattaagcattttagttaaaaaaaatttcacttacctttttatctaaggctgctgcaatctttttaagggtgtctgttgttgtagttgtggttcttcctgtttctaatccattaataatggtacgtgagacaccggactttattgataattcagcctgtgtcattccaatttcttcacggatttccttaattttatagcccatggcttttatctcctttctgtttctctgttttctttagcttaacatgttaaacactacatgtcaatatgtttaacaaaaattattttaatatgttaaacatgtataatttagcattgttcaatatgttaaagttttatattgatttatttattaaacatgtgtataatatgttaaacaatacacaaggaaggagtgattaaatatgactctcggtgagcttgtaaaaaaatatcgaacagaacatgagctttctctccgagatttttctcgattatctggaataagtaatggatatatttcgatgttggaaaaaaatgaacacccaaagactaaaaaacctatagttccatctatagaaaaaatgaaatgtatcgcctctgcaatgaatatgtcattagattcattacttgacgccattgatggggaccaagaagtatcaattaagccggagcctgcatctcttattaaagcagacgaaagtgagttgcttgctaaataccggcatatgaacggcaagggcaaacagcggcttcttgagcgtgccgatgaacttattgaactgggctatgttgcaaaaggggacgaactaaaggaggcctgaaatatgttattaataaaaacattattgaattcaggtagttttatcccatgcatcctgcccttatatatgttaagtctatgaaattaagtagaagggagttccaatgcgaaagaaaatatataatattcttaaccaaaatgccatttatgatacatttatgtttacagtcataattatgagcattattccattggcttttgttaaacaacaatcttggatgacattaattgacaggataactgttatcatttttattgttgattatattttacggtggttcgtagctgataagcttagtaataagcttaataaatttatactatatccactaactccaatggcgataattgatttattgtccattcttccatcaataacattattgaatagcagctttaagttactaaaaatttttagattatttagatctctgcgattacttaagattttaaagttagttagatattctaaaagcattactatgatttgtaatgttttcaaaaagcaaaaagagacatttattaccatattggtcatggctattacatatattctggtttcagctctggtaatcatcaatgttgagccagaaacgttcccaacatattttgatgccctatattgggctacgatatcattaaccactgttggttatggtgatgtgtatgcagtaactacaatcggaaaaattattactatgatttcatctttcctaggaattgctgttgtagccttaccggccggtataataacgtcaggtttaatggatgaattaagcaaatcacatgatgaatagtcagttttgcgccggcgcaaattttaatcttatttttaatatgaatacttgacaagactaattcatatgctataatgtagctaattagcgaatgactgctgtgcggtcgcaaaattagtcttggtttattccaaggctttttttgcgtttatgaggattttacaatgaataaacaaataacttatactgacgtatatagtcagctagaaaaattaaaatctcaaaatcttataatatcagatgaggcttttgctattagtgctctttcgagatatggttattcaaacctaatcaaaagctatagagaaccatacataatcaggtacaatgattctatatattataaggatggcgttacttttgagcaaattttatctttatttattttagataagaatctgagaaactctgtcatggccgctatgctggatctggaagagttcattaaagaagctgctgccgatgtaatttcaaaatcattcggtactgcctctgcaaaatatcttaattataggaattatgctaataagaaacgtagaaaaaagagatttacactttctgaaactttagaaaagataaaaaaggcattgtattcagataaagatccaatacaccactatatgtcaaagtatggtgatgttccaccttggatactctttaagggggtatattttactacaattgttaattttgtcggattctttaaaactcctgagcaaaatgaaatgatatcccatttataccatgaccactacgattttatttacgatgattccatgaaaaaacttatgatggatactcttttcatttgtattgattacagaaatatgtccgcgcatggcggtcgtatttataactatcagagtcgcaataccctgcgaaaagacgagatttttcatgcggattatggtttaatgacctctggttttagtgaattgctttttatattaagtttgttatcatacacaacaccttttgaccgacttaataacgctcttcaatatgaactcaatcgtcactgctccctttttcctgatgacagtgaatatctttctaaagtattaaatattgatattgttaaaaaggattttgtatattataaagcatctggttcaaagtatcacactattccatcatgtagtggtatgcaggatgctattcaaattgacatcgaagaggcaaagtctcttggtttagcaccgtgtaaaaggtgctgtaactaaacaaacgccctgcagcggcaactgcagagcgtttatatagatgttacctattaacccgagggccaatataataactccataagcaagtcttattatatcacatgccctcttttttagaaaggggctttttatatgtctaaaactgtcgctatctatgtcagggtttcaacagggaaacaggctgacagagactctatcccttttcagattcaggaatgctccaactatgtgaagcattttcttaaaactgaaaattttgaagtattcaaggatgctgggcgctccggcaagaacactcaccgtccggagtatcagagaatgattgagaaggtcaaatccggcatgatttctcatgtcgtggtgtacaagattgaccgtatatcacgtaaccttgtggacttctctattatgtacaatgatttcaaggagcataaggtggctttcatctctttaaatgagcaatttgatacctcaagcgctattggtgaagccgtgctcaagattatcctcgtgttcgctgaactggagcgcaagctcacaggtgagcgtgtgcatgacatcatgatgaaccgtgcgcttgagggcaagtggaacggagccagggtgccgtatggctgggactgggatacaaagaagcaatgtccggtgcattctgatactgaggcagaatatgcccggatgatgtacaggctctatgatgagtgccactctacctgtgtggtgcgtgattactgcaatgctcacgacatcccgaccaagcgtggcggtgagtggaccagcaagaccgtggctgattttctcaggaatcctatgaatgtcggtgactaccgctacaattacaggaaatctgccagaggcaagaggaatgatccgtctgaggttatctatgtgaaggatgtatttccacctcttattgacagagagctctatgagagggtgactcatcagatggacctgaacaccttcggactcggcaaggatgggcgcaaggtggtcagcaagaagactcatgtgtttggcggccttgtcgtatgtggtctgtgcggggctttctatcactccgatgccgatgtggtcagagccgatggtttcaggccgtcgaattatcgatgcggtgctcacaacaaaaaaattcactgcaaggcaaagggcacctctgatgtgaagctcggaccgtttattttcaactatatctcaaatctggtcaaggcttccaagtcaaagaaactgctgcactctgtctctgatctggagcagatactcctcaccggcccggagtttgagcaggtggcaggcatcgctgacattggactggatgtcacctttgacactatcatgcatggtttcaagccaaagcggtacactgctgcaccttataccgtcatccgctccggtgattctgatgcactcacagcaaaaagagataagaccatcagagcgcttgagaggctcaagaagctgtttttatttgaagatgatgcaatgagtgaaaaagaatatctgatgtctaagagggagcttgagggcacgctcagcgacatagagaatgagctgtcagctcttgaagccgacactgcagatacaaaatacgatgacatgtctttcatctccactgcatccggatttttaattgctcatcagattgcatcaggtgagcacatcaactacagggagctcgcctgtgctgtagatgcaaaggtgcttaaagatttcgtgaacagtgtgattgagaggattgttctgctggacggacgcgtggcttcgatagagtttaagaatggactcgttcacgagttcctttacagagaataagagcaggctgaggaggcagcctgctctctttatgtgtgtatgagtaagattagattaacaagaaaggttgattttacaaggttttaggcatcttgtttttagagttcatctgacagccgaatgtctttacaaaataagtcataggacggccgatttctttagatttcttttcaacaaaatcctttgcctttgccatgtagtaatactgcctctcaggctcatgtgccggtggtgtctttgttatatctatatcgtagctcatgttatattatgtttcctctcaaattaattctatgatactttagctgactattccctgatctgaccactgccgtaaataatatacttatagcttgtcagtgcttcaagccccataggtccccttgcatgaagcttctgtgtgctgatgccaatctctgctccaaagccgaattcattcccatcagaaaatctggttgaggcatttacataaacgcaggcggcatctatctcatttaagaacttctgtgcgttgtcataatcatttgtgacgattgcctctgaatgtgatgtgttgtatctgttgatatgctcgattgcctcatcaatactgtcaacaatctttaccgacatgatgtaatcaagatactccataccccagtcatcggcagtggcctctgtcacatcgtctcttccggcaagaattgcctgcgctctttcatcacagtgcagctgtacatgatgctctcttaacttatcatacagctttggcagaaactcctctgctatggcgctgtgtactacaatcgactcacatgcattgcagacactgattctttgtgtctttgcattgttaataatattaacagccatgtcaaagtcagcatccttgtccacatatacatggcagttgcctgtaccggtctggatgacagggattgtggcatttttgacaacattctggatgagtcctgcaccgcctcttggtatgagcacatccacatactgatccatcttcataaacgcatttgttgtctctctgtctgttgactcaataagtgcaagtgcagcagcagaaaccaaattgtccgttaaagccttttttaaagcctttactattgcgatattggtatttatcgcatcacttccacccttcaatatgacacagttgcctgtcttaaagcacagaccaaaggcatctgatgtgacatttgggcgagcctcaaaaatgattcccacaacaccgattgcaactcttctttttcctataataaggccattaggacgctttgccatagacatcacttcccctatagggtctgccagctttgctatctgtctgagtccgtcagccatgccaaggagcctgtcatggtcaagcgagagcctgtcaatcatgctctttgccttcatattttcctctgctatagccacatcccttttgtttgcctcaaggatttctttttctgccttaagcagattgtccgctgcatcgtttaataccttattcttgatatctgtatccagtgttcctatctttactctggcctcgtatgcatccgcacaaattttttctaaatcagtcatcaataaacacctctctcttatctgttatcactccatctaagggtacgtcatattcatcttcaatcgtcatgctgctaagtaactggaaatcgtagcccactccaactgccatgacagtatctctttttgtaaaagacgataaatatctgtcataaaagccctttccatagccgattctgtaaccggtatccgaaaatgcaagccccggcactatcataagcgccctgccatccgcctgcgtatactccttcgtcatatcaggctctttaatattaaaagaaccacaattaagctcatcaaggcttcttaccctgtaaaaggacattttattgcccgaaaccctcggataatatatcctttttgctttgtttattaaataggtaaaatactcatcagtattcacttcatttctgatagctgaatacaaaagtatgttgtcatattccctgtcgagctctaaagctatgagccttttataaatgtcatggctcatgttgtggcactcatcagcacccagaaggcttctttgcttttttagcctgctacgaatttctttttttgtttccatatttctcgccgaggttctcaaccgaaccgtcatcgtttaccatatcgatattgttgagctggtttcttaaattcttcttcacgtttgctatatactccttgcgcaaaagatcctgctcctttttctctgcctcagaaagtccctctgcctgtgactttctgtaaagctcattgattcgctgtattttttcctgtgtcatagcactctcctgatttcaaatttatagctgattactggccgcctgtagatgtaggtgccatctctctttgtatataatccgcaagcacaaactctgcatcctttgccctgtggaaaagtgttcctgtatatctgtcattcataatgtcatacaaaatccccatattgccgccgtttgcgataatcatatcggcaccggaatatgtggcaatctttgccgctgtaagctttgtcgccatgccgccggttccgacatcgctgccggttgatgactttgccatgccaagtattctcctgtcaagcgtatcaacctctctgataagctttgcatccggattgtcatgaggatcgtcggaatacagtccgtctatatcagaaagcagtatgagcagatcagccttcgtgattgatgtaacaatagcagacagcgtatcattgtcaccaaactgcatctcgtatgtgcttaccgtatcattttcattgacaataggcaccacgttcagatcaaaaagctcctcaaatgtattcataacattgcgtctggaaacaggattgactatggtattctttgtcatgagcacctgtccggaattctgattatactcggaaaaaagcttctgatatgtcatcataagcctgccctgtcccactgcggcgcatgcctgctttattgaaatgtcgctcgggcgctcctttatgcctatcacatcacgtccaaccgcgatagcgccggagcttacgaggcacacatccataccgctgtttctgtaatcacatatcgagcgcaccagacgctccatctttgaaaaattgaggcttcccgtctctgcatgtgtcagcgtcgatgaacctatctttattaccactcttttataattgtctaaaaaactcatttctatcatctttcctattgtaagtctaaatgcatacataattacattacgcatacatttactactttaccatatattcatgcaaaatacaaaatcatttttactactgtctcatttttttattctgtgttattatatttatgcttttactatttaagctttaactataaataatttacaatcaggaaattaataaaggatgcattatgaaaaataaactaaaacaccttgtccctgtccttttggcgcttgccacaataacaggaagcctgtcttcatgtgaattaaagcccaaggctcagcagaaggtttcaaaacagggtttctactttgacacgataatacagattacgctttatggcactaccgacgagaaatacatagacgactgctttgatatggcaaagaaatatgaggatatgctgtcaaacacagttagttactcagaggtgagcaaaataaatgacgctgccggcaaagaatatgtcacagtaagcaatgatacgcttgagctcatcaaaaatggcatcgaatacggcgacacaagtgacggcaggtttgatatcactataggaaagctgtctgatttgtggaatttttccgaaatagctgaaaataccgactctaaagataatgaggtggatgcatcagtcgttccatctgatgcgcagatacaaagcgagctgtcacatgtaaattaccgcaatatacagattaacggaaacgatgtgatgctaaccgattcaaaagcaaagcttgaccttggtggaatcgcaaagggctttatcgctgataagatgaaggcttatttacagtccaaaaaaattacctcaggcatcataaacctgggtggcaatgtcctcactgtcggtgaaaaatccgacggaagtgattatacagtcggcatacaaaaacccttcgacgagagcggtgagccaatatgtaccgtcaaaatcaaggacaaatccgtcgtcacctcaggtatctacgagcgatactacagagtagatggcaagctatatcaccatatactggacaccacaaccggctatcctgtcaaaaataatctgtactctgtcaccatcataagcgactcttcctgcgacggagatgccttaagcaccacatgctttgctcttggcattgataaagcaaaggagcttatcaattccctttccggtgttgaggcaatatttgtgacagatgattatagtattatcacgacatcagatgaatataacgtaagcaaagaatagctgcaagcttataaaaaagctgccacacatcataatgatatgtgacagcttttatgcattataaaataatcttctttggacacttctctgcgcagattccgcagcctgtacatttctcctgatcaatataagctacattgtctactacatggacagcatctgacggacagttcttctcgcacagatgacagccgatacagcccaccgagcatgctttcatgacatccttgcccttgtcctttgagctgcactttacaacgtgctttgtgtcatatggaataagctcgatgaggtgctttggacaagcctctacacacttgccgcaggccttgcatgtaagcggattgacacatgccactccgtcaaccacatggattgaatcaaaaggacatgccttcacacagcttccatagccgaggcagccataattacatgacttaggtccgccgcccggtacaaatgacatggcaacacaatcctctactcctgtgtagtcatagtctgtatttgctttatcacaggtgccggcgcacttaacaaatgcgactttctttactccggcctcaacctttacacccataatctcgctgacctttgccgcaacagggtctccaccaacaggacactgtcctaccggagcctctccctttgcgatggcggcagcaagtccggaacatccggcatatccacagccaccacagttgttgcccggaagcacctcaagtattgcttcctctctcgggtcaacctctactttgaatttttctcctgaaataccgaggaaaaatccaagaattataccgacagctccaacaactaaagctgcaataataatcgcagtaacattcatatcacttttcctccaatcctatacagaaaccattcctgagaatcccataaaggcgatagccataagacacgctgtaagaagcacgatggctgttccctggaaaggctttggaatatcattatactcaatcttctcacgaacacctgccataagcacgatggcaataaagaaaccaaaagctgtggcaaagccgtaaacaacactctctaagatattgtagccctttgttacactgttaagtgctacaccgagtacggcacagtttgttgtgataagaggcagatacacaccgagtgccttgtaaagaggaggcatctgtttctttaagaacatctctacaaactgaacaagtgctgcaattacaagaatgaacacgatagtctgtaaatatgacagattaagcggatacagtataaaattgtaaataagctgtgtaacgaatgtggcgattgtgataacgaaaattaccgcaccacccattcctgcagcagtttttgtgttctttgatacgccgaggaaaggacagataccaaggaactggctaagtactacgttgttaactattgcatatgctactgcaatgagcagtaaatgacctaatgtacccattatttatcccctccttctgcagtgttaggcgcaacagcggcctgtgctgcttttgctgatggacatgatgctccacaatgtgcacaatctcctgaaaggcagcctgccggctcagcaagaggtgtaccctttgcttccatctttttacggatgatattcatgcctgcaacgaggaagccaagtacaaggaaagctcccggtgccatgataaagattgtgattggtgtaaaccagtcaccgaaaatcttgatgttgaagaatgttcctgcacctaagatttcacggataagtccgatgattgtaagacccatggtaaatccaagtcccattcccattccatcaaagatagactctacaggcggattctttgaagcatagctctcggcacgtccgaggatgatacagttaaccacgataagtgggatgtatacaccaagtgctgctgaaagactaggcagataagcctgcattaaaaactgtactactgtaacaagagatgcaactatgacgatatatgccggcatacgcactccgttaggaatcacttttctgaaaagtgaaatcaaaaggtttgaacatataagtaccaccgtggtggaaagtcccattccaagtccgtttatcgcactggatgtaacagccagtgtaggacacataccaagcataagtacaaaggtaggattttccttaatgataccattatataaacgctctacatatttgttcattagttggcacctccctgtaatttattctggaagtaagtaatagctgcgttgcagccgttggccatagcctttgatgtgattgttgagcctgtgatggcctcaatctcatcatcctttgaaggtgtggcctttacaacgtcgaacttgtctactttcttgttctcaaactgcttgtagaaatcagcctcctcggccttcattccaagtcccggagtctcactgatacttgtgatcgagtagccgtttacagtaccatcattcttgatacctacagagaatgtgatacttccctggctaccatccttggctgtaactgtgatgacatagcctaatgtctttttgtttgaatcaagggcagtctcaatatcatcgattgtatccttgtagcccgcatcagatacaagcttatcagcttcatcagcatcataatcatatttctcaaatgattttgcatccgaaaatactgcctgatatgctttctgtgctgctgctttattggccttgtcgataggctctgccgtgattccctgaaccagggcaagaataaaaccaagcaccaaagtaaaggcagttaaaatcaaagcgtcatgtacaatacgtttattcattcttctttgcctcctttaccataccaaaggctcttgggatagaaaccttctcaataataggaacaaggcagttgcttaagatgatagcaaaggaaactccctctgcattggcaccgaagcaacggaatactcctgtcaatataccacagcagataccgaatattatctttcccatcggcgtaatcgggcttgtgacataatcggtcgccatgaaaaatgcaccgagcatcagtccgccaccgcagagctctgcaacaacatagttgatatcaaactgctgtgctccgaaaaggaacatgaaaacggcaaatgtaataatgtaagatgcaggaatctttaaatcaatgactccaagtaaaatcatgatgatagcacctattaaaatagctataactgatgtctcaccaatagttcctgcagtatttcctataagcatatcccttacattgacacttgaaagtccctcatttttgatgagcgcaagtggtgttgctcctgagtatacatccacaccgtttcttgtgacattgaaattagtcatatcagccgcaaatgcgatgagaaggaagcatcttccaccaagtgccgggttcataaagttctgtccaagtcctccgaaaatacacttgacaatgatgattgcaaatactccaccgagtacagcctcccaccatggaagtgaaaccggaaggtttagtgctaaaagcagtcctgtaacaaccgcactaaggtcggtaattgtgctctttttcttaactatgtagtcaaacacccattctgatgccacacacgatgcgatggtaagcagaatgataaaaagtgctctaaatccaaaattgtaaataccaaaaagacttgccgggagtaatgctataatgacataaagcattattctgtcagtggaatccttggcacgtacatgtggtgatgatgaaacatgatataaatcactcactttaatccacctctttctttattttttgctggcctgttttctcttttcagcgagaacaagcttcttcattgtcttaataggctgagccacctgtctccttgacggacatgcaaatgaacagcttccacactcaatacactcaagtccatgccacttctcaaactcatccatctgtccacgcaaaccaaacttcgcaagacggcttggaatgagctgctcaggacatgcctccacgcaacgaccgcagttaatgcaggcctgtggctcaaatgctgccacctcatcatgtgtgaagcacagtattgatgaagatgtctttgtagtagggatatcaagactaaacatggcaaagcccatcataggaccgcctgatataatcttctccggctggctcttaaagccacctgcagcatcaaccagctcctgatatgatgtaccgatgctatataaaatattggaaggattcttcacagcatctcctgtaactgttgaaatacgcttaaggactggctgtccattctttacagcattgtatacagcaatgattgtctctacattatcaacgatacagcctgcatcagcagggagcatcttagaattgatggctctgccggttgtagcatagatgagctgtctctcaccaccctgtgggtactttgtcataagcggacaaacctcaatacgtggctcatccttcgtgagctctgtgagcttttcgatacagtcaggcttattatcctctataccaaggataccctttgcattgtcaaaaagctgaagtatgatcttcatgccgccaattaattcctcaggattctcaagcatacgtctgtagtcagatgtgaggtaaggctcacactcagcgcagtttgcgataatatactcaatcttgtccggctcctttggagaaagcttaacatgtgtagggaaaccggcaccgcccatgccgacaactcccgcattcttgaccttctcgatgatttcttcctttgaaagcgcagtgacatcctcgacgctcttgtatgttgtctcagtaaacatgccatcattttcgataacaatactgtcaaccatatcgccgaccgccacacgtcgcttctcaatagccttaacttttcctgacactgatgaatagataggtgatgaaacaaagccaccggcctctgctatcatctgtcccttcaacacagtgtcacctacggcaacaacaggcttagccggtgcgccgatatgctgcgaaaccggatataccatgtcgcccttgggcaaaacttctttaattggtgaatccttagacagctctttgccatcatatggatgaacaccgccaataaacgttttatgacccatttttgtgcccctctttcttttagattaataacgtggaaatgctattgcacattactattcctattataccacttatgatttttagttaaatagtatattatgtactttttttaatactttatgttataatgtttatacaaatgatattcaaggcaggaatcaaaaatgaaaatatttcacaatgaagaaatttacataaaaaccgataatttttcagacagcatatttaaagaaaacacaatgttctttgatattgagacaacaggcttttcaccggtgaaagcgattgtctacatgataggctgtgcaaggcgcattaaaaatcgtattgtaatagaccagtattttgccgaatctgtcgatgacgaagcagctgtaattgaagccttcgcaggaagtctgtccggttgcagcactatcatatccttcaatggtgtcggttttgatataccatttttaaagaataaatacaagaaatataagcaggatgaccccttctgtaatgtgcagatactcgatatctttaaggagctttccccgataaagcctcttttgtgcctcgaaaactacaagcaaaaaagcatcgaagcatttcttggtatagatagggaggataaatattccggtggtgagctcataaacgtttattatgaatatcttgcccaaaaggacgacgaaaagctatccctgcttttgacacacaactacgaggatgtccttggcatgacaaagctccttagtatactttcgtataaagaatgcatacatggcattgcagacatcaccggtgtatctgtaaacccatatacagcttacgacggcagtctgatgaatgagcttatcatatcatttgaaaataaattctccgttccaaaatctgtaagtttccatgacaatgacatctatctgaccatcggcactacaaaaagctatgtgcgtgcagagatattcgagggggaaatgcgccatttctacagcgattataaaaactactactatctgccaaaggaggacatggccatacacaagagtgtcgcagcatatgtcgaccacgaataccgtgaaaaatgcaaagcgtacaactgctatgtgcgcaaaaccggtgccttcatcagacagtactctgacttcatgaagcccgagtttcgattcgatataaaggataagtacagctatttcctgctgactgacgattttataaattcaaaacagatggtactgtcatatgtaaaacacataacagaccatctgtttaatctctgataagatatcatggcttcctgaaattctccaatatgtgccacccgatacaaataaaagctgtcatataattatatatgacagctttaaaatcaaaaactactcgttatcagaagcaacctcgtcaatatttacatctgcaacatctgctccatcatcctctgaatcaagaagagccttcatgcttaagctgattttcttatcgtcctcattgaactcaacaaccttagcctcaatctcctgaccaatcttcagaacatctgatggcttctcaacatgatcctttgaaatctgtgaaacatgaagaagtgcgtcaacaccaggagcaagctcgatgaatgcaccaaaatctgtcattctggctactttgccctttacgatattgccaggagcaaatttctctgttgcaccattccatggattctcatcatcaaacttcattgaaagagcaatcttagaaccattgatgttcttaacaaatactcttacagtctgtccgactgtgaataccttcttagggttctctactctgccccaagacatctctgaaatatgaagtaatccgtctactccgccaagatcgatgaatgcaccgaaatctgtaacattcttaactgttccttcgattacatcgccaacatgaagatttgcaagaagctcttcctgctgtttagccttctgctcaacgagtaatacctttctgtttccgataatacgtctctttcttggatcgaactctgtgatgataaactcaatctcctgatccttgaacttgttgagatccttctcataagtatctgatacaaggcttgcagggatgaatactcttgtctcatcaacactgacacatacaccaccggctaatacctgtgtaacttttgcctttaatacttcctggttctcaaaagcctcctcaagacgcttgctgcccttctctgcctgaaggcgcttgtaagaaaggataacctggccctcgccatcgttaagcttaactaccttggcttccatcttgtcgccaacctttacaacagtagtaagatctacgttaggctcatttgtgtactcgtttctagtaataattccgtctgatttgtatccaatatttaagaaaatctcgtcaggtttaacatcaataacggtaccttctaccacttctccatttcttatagttttaaaagattcttccagcatttgttcaaagctcatttctgacattctttgaaacctcctcaatgatattatttggggttgaagcccctgctgtaatacctacgttattgttggacctgatttgtgtataatccatttcgtcacttgtctgtatatagtaagtatttttgcattcgtttttacatatttcaaatagcttctgtgtattggagctgtgcctatcgcctatgacaatcatgacatctgagcactgtgctacctttcttgcttcggtctgtctgacctctgtagcatcacagattgtatttaaaacagttatatcataacctttttttgcaataatttcaactatatcttgaaatttattgtagttaaatgtcgtttgtgacactatgcatagtttttttgtactatttttcatgtaattttcggcatcctcaggcgaatttatgatggttacatgacatttttcgtctgcccaaccctttattccgcacacctcagggtgctttggactgccgacaattataatatcatagccctttgagctgtaatcctccacatatctgtgaatttttgatacgaaaggacaggttgcattaagcacctcaaagccacagttttttatcctgtcatactcagccttgcttataccgtgtgaacggataatcatcacacccttttcatgagaagaaagctcatcgagatcgtttatgacggttacgccatttttttccatatcctttacgacctcatcattgtgaataatcgggccataggtgtatataggcacattttccttttcaattgcctcatagaccatatttactgctctcgtcactccaaaacaaaagcctgcgctctttgcgatagtaagctctcccatacgctatgcctctttcacaagctgtttcattctatctaccacctcatcgattgtcatatcagacgaatcaagcagcacagcatcatccgcctgcttcaaaggtgatgtctctcttgtcatatccctgtggtctctctctataatatccttctcgattgcatcaatatcgcatttctcaccctttgcagtaagctcatcgaagcgtctctttgcacgtactttagagcttgctgttaaaaatatcttgacattggcatcaggaagcacaacagttcctatatctcttccatccatcaccacattctctctggcagcgagctgtctttgaagctcaacaagcttttctctaactacaggatagacactggtagctgatgccatattgccgacagtctcctgtcttataaagcctgtgatattctcaccatttaagataacctgctgttcaccgttttcatagctgattgaaacctcaacatccttacataacttcgtgatggtgtcaatatcatccttgtccacacccttttggataaaatagtatgccatagcacggtacatggcacctgtatcgacataaattgcgccaagttcctttgcaagtctctttgctatagtgctttttccggctcctgccggtccgtcaattgctatattgtatctcataatttctccttaaaatattattgttcatcatttttattaaaatcccagctgctcaattcactatgcgcataaataactgttattataagtgtctcaaaatagttttccaaatcatcaaaccgctgcacttgttcctgccagatatcctgtggaccatgctatctgcagattgaaacctcccgtatatgcatccagatccagcacctcgccggcaaagtagagaccattcacaagcttcgactccatagtggatggattgatttccttcacatttatgccgccctttgtgataatagcttcattatatcctcttggaccattaagagtgacaggcagcttcttaaaaagcataagaagtctgtttctttcctctttcgatatctcattaaccttcttatccgggtcaatgcctgaaagctcaattatcaccggaatcatttttgcaggcaaaagcttgtttatcgaattcttaaactgcttgtttttcgcctcctcaaactccctgagaatcctcttgtccaaggcctcctgtgtgagagccggcttcaaatcaatatacatgtcaagaggctgcttaataaggctttgcttaattgatgcactcgcagacaaaatcatagggccgctgaccccgaaatgcgtaaaaagcatctctccaaaatcctcatacagcttctttttgccactatatatggaaatagccgtatttctaagtgaaagcccctgaagactctttacccactcttcctttacattaaaaggaacgagtgaaggtgtgcactctgtcacagtatgacctgcatcctctgccattttgtagccgtcacctgtagagcctgtagacggatatgaaagtcctcctgtggcaacaatgactgcatcagcatccattttggtgccatcctttaatatgacacctgttatttttaattcaggctttttatcactagcttcctcatctgccctagtatcagtgattttctcatagcacagcttcgatacctccgtatgaagcaatacctccactttcttttccttcaaagctctctgtaaagcaaaaatcacatccgacgacttatcagacaccggaaatacacgattgccacgctccacctttacaggcatgccatgactctcaaaaaaatcaatcaccctgctgttgtcaaagccataaaatgcactgtacaaaaacttactgttgctctttacatttaaaaaaagctcctcaacatcgcacgcattggtcagattgcatctgccttttccggttatatatattttcttcccaagtttctcatttttttcaagaagcgtaaccttatttcctacatctgcagcaaaatatgctgcaagcattccggcggctccgcctcctaccacaataattttcttactcatcctgcgaatcccccagctttgcataatgtacctttatagagtcatcaatgtaatcaatctcatcattctcatatacctgatactcattccatatatcctcaagctctgtcagtgtctttgcgacaatattctgctttttcatgcaaagagctacaataagggcattgataacagaaagcggagccacgagtgaatcaactatagaggccatatcgctgtcggcaatcagattacatgaagaatacagattcatcggtgagtgaatgctgtctgtgatagtgataacctttgcgctcctgttgttggcaaattctaatgccttaagagtacgcatagagtaacgcggaaagctgatgccgacaatcacatcatccttgccaatgcgcaccatctgctcaaaaagctcgctcgagctgtttgtcgtaagcagacacacatcctcaaacatcagattcatataaaatgcaagaaagctcgcaagaggtgcacagcttctgattccgacaatataaattttccttgactgtaaaatagtatctaccgccaggtcaaatgcatccgcatcaattttttccagagtggtcttaatcttgtcacgatcagactgcagtacagtctcaagaatctgtgactggctgatacgcccatatgtgacctccatgcgctgaaccgaattgagcttgttccttacaagctcctcgagtgccttctgaaaatcgggatatcccttatatccgagcgatgtagcgaacctgacaaccgtagactcagaaattcctaccgtctcgcccatcttagccgctgtcagaaagacagccttatcataattatcagttatgtatgtagcaagcagcttgtgccccttgctcatcgtactgtatttagcatttatcctgttaagtaagtcgttagtatttgacatcatatactcctgagctttcccgtttatggctgtgcttcacacatttgtgtgacctgcagcgattttttcataccttaaaatattatcactttttccatctatatgaaagagcgaatttatattttttatttttgccatagaatagactcgtaagttcccctatccacacaatataaaaaacaggcccggcaaagccggacctgtttgaaattcaaaagcatgaattatatttttaaatactatacaggataagccttattctcagtatcagcggcctttgcatcaacacctgtctgctgtgcctgtctgtacttgaagaaatcagtagcaacctgtgggaagagagcataagaaagaacatcctcatcctgctgtttccactgcttcatctcagcctcaatcttgtcaagctctggctcaagaagatctgccggacgacatgtgatggcattcttcttatcatcaccaagaaccttgtcaacaacctcagggttgaaaggcttaactgtctgtccatacttaccaagaaggatatccttagtctccttagtagcaaccttgtatctctcgcccatgagtacgttaaatacagcctgtgtaccaacgatctgtgaagaaggagttacaagtggtggctcaccgaggtctttacgcacacgaggtacctctgcgagaacctcctcgtacttgtcctctttgccctgctccttgagctgtgagataaggtttgaaagcattcctccaggaacctgataacggagagtattgatatttactccgagtacctttgggttcatgagacctgaagctaaagcttcctctctcattggtctgaagtaatcagcaatctcacttaagagattaagatcaagacctgtatcaaactctgtgcccttgaatgcctcaaccataacctctgttgcaggctggcttgttccaagagcgaatggtgacatagctgtgtcaatgatatcaactccggcctcaacagccttcatgtatgtcattgaagcaacacctgatgtgtaatgtgtatgaagctcgacaggaaggcttgtagaatcctttaaagcctgaacaagctctgtagcctttgcaggaactaaaagaccggccatatccttgatacaaagtgagtcagcacccatgtcctcaactctctttgccatatccatccagtagtcaagtgtgtaagcatctccaagtgtgtatgaaagagctacctgggcatgtcccttttccttgttacatgctgtaactgctgtctgtaagttcctgatatcatttaaacagtcgaaaatacggatgatatcgattccgtttgcgattgacttctgtacgaaatactcaacaacatcatctgcatatggacgatatcctaagatattctgtccacggaaaagcatctggagctttgtatttttgaagccgtctcttaattttctgagacgatcccatggatcttcctttaagaatctaaggcaggcatcaaatgttgcaccaccccagcactctactgcgttgtatccaaccttgtccattttgtcaacgattggaagcatctgctctgttgtcattctggttgcaatcagtgactgatgtgcatcacgaagaacagtttctgttatttttaatggtttctttaccacttctgacatgattaatcctccttaattaaatctaaataccgaatatagccatgaagcatccggccgctacggcagttccaataacaccggctacgttaggtcccatagcatgcataagaaggaagtttgttggatcctcttctgcaccgaccttctgagatacacgggcagccataggaacagcggatacaccggctgaaccgataagtggattgatcttgccttttgtaaggaagcataaaagctttccaaaaagtactccggcagcagttcccaccatgaatgcaataagaccaaggataacgatcttgattgtgctcatattaaggaatgactctgcgcttgtagaagcacctactgatgtaccgagtaagataactacaatgtacataagggcattgcttgctgtctcctgaagctgacgtactacaccagactcacggaaaaggtttccaagcatgagcataccaacgagtggtgctgtagttggaagcagtgtacaaacaacgatagtaactactacagggaagagaattctctcaagcttgcttacaggacgaaggttctgcatcttgatcgcacgctctttctttgtagtaaataatttcataattggcggctggatgataggtactaatgccatgtacgagtacgctgccacggcgataggtcccatcagacctgtctgacctaattttccggcaaggaaaatagatgtaggtccgtcagctccaccgatgatagatacggctgctgctgccttgtcattaaatccgagaaggattgcaaggaaataagctccgaaaataccaaactgtgctgcagctccgagtaagaagctgatagggtttgcgataagcggaccaaagtctgtcatagctccgacaccgaggaaaatcagtgaaggaagaattgaccactcatcaagtgtatagaaataataaagtaaaccacctactccattgcttgagtgctcaggacttacaataatatcaggatagatattaacaaggagcataccaaaagcaataggtactaaaagtaaaggctcaaatccttttttaatagccaaaaacaggaatacacatgctacggcaatcataacatagtttccgactgacagattaaaaaaggcagtctgatgtaggaggtttgaaagtgtttcacctacgtaactcaaattagtttacctcctggaattagtttaatgttgcaagtaatgcacctgactctactgaatcaccaacagcaacatcaatgcttgctactgttccatcctgtggtgcaacaacaggtgtctccatcttcatgatctcaagaataagaagtgtatcacccttctttactgcatcgccaaccttagcctcgagcttaaatacctttccggcagctccggcctcaaccttgatgcttcctgctcctgcaggtgcagcagcctttggtgcagcggcagcaggtgctgcagctcttctaggtgcgcttgctgtgctaggtgtgcttcctgtctcttctactgtaacatcgtaaacatttccgttaacggtaattgtatagtttttcatctcaaatgtcctcctaaattatcttctattgattgaacggactacaaagccctctgttgtagtaccctcgcttgctgctatagctgctgagataacagctacaagctctgtatcatctgtaaggtctgtagcaggcgttgctgcaacaacagcctctttcttttcaggctcgctcttagcttctgccttccttggcttattgccgataagagcaataaacttgaagcagtaaatgataagagagataagaataagtacacagaatacaatactcattgaaattactgtgttctgtcctgccttagcaagcttctgtcccattgtctgaacaggagtaagtgagatacctgttacctccatggtaaccgaatcatatactaattcgtatgttacatcctgcttgccaaatgtaagtgtcatgtcggtagtgagtgtaccacctgacttagttactgtaaaatccttgccatcagttgcatcctttacgtctccgtatttgtcaaccagatcaagccatgatgaaacggcatcaagctcagcgtcgatatttttcattgaaacgcttgctcccgactgtccgagtgtgttgtaaacaacctcaccctctgtcatgcctgtcttctcctcaactcccttgacactcttctcatagctgtcataaccgccacaactatctacgagtgcaatgtagttctggatgttgctaaggctgtctgttgcctcagtatgaagctcgtctgttgtgtatccgccatatgtcttttcggcattgtcagagccacatgctccaagcatacatacaatcataagaaggctaaggatatatgttatttttttcttcataacaaaatgcgcctttctattatttagttccgtgtttcttctctggtgcatctacatatttggtgtaaagcatctcaaaagcacctacaagatattttcttgtgtcagccggatcaatgatgaggtctacatatcctctggctgctgctgatgaaacagaagactgaagcttctcgtaatcagctgccttctcatcaatttcctttgcatcagcgcccggatacataatctcagctgcaatctttgaatccatcataccaatctttgcatcagggtatgcataaaccatatcagctccgattgacttagagttcattgcaacatatgcgcttccataagcctcgcctgtaatcaggttaacctttggacatgttgcacttgagaatgcgtatgtcattctggcaagagcctttgcaagcttcttctcagagcacatgcagttcttgaatccgtttacgtttgtaagtgtaagtacagggattgagaaagcatcacagaatgatacaaactcagctgccttgttgcagccctttgcagtaagagaaagtgcaaactcctctgccttcttgccctcagcatcatatactgtgctgcagtttgcaactgcaccgactgtcatgccgtttaatttaacaaagcctgttaccatattcttggcaaagtctttctttgtctcaaagaatacatgatcatcagaaagctctgataagaggaatcttggatcagccttcatatcagccatgctgttacatgctctgttgagatcatcctcacatgagtctgtatatacatctccctcgttgttgagtggaagcatgctgacaagagctctgatatcagcgataatatcatcctctgaaccgattccgtctacacatccattgttctcactctggaatgaagctgctgctgtatcgcatttctcaacgcggttaccctctattgcatcaggagtattaacaaacattctgcccttagactcttcgatataagcgaaatcacaaagagccggtactacagaaagtccgccaccacagttaccgaatacaccacaaatctgtggaataacgccacttgctgcaacttccttggcgtagataagaccaaatccgtctaatgcatcaactgactcctgaagtctgataccaccgcaatcgataaatccgataacaggtgcgcccattttcatggccatatcatatacagaagcaattttctttgcatgcatctcgccgattgttccgttaagaactgttgcatcctggctgtagataaatacaagatttccatcaatcagaccgtgtccgataataacaccatctgaaggagcttttgctgcagtaaggttaaaatctgtactgcgagctgtcacaagagaaccaatttccatgaaactgttctcgtcgactaacttagcaatacgctgcattgccaagctttgattgttactactcattttatatcctccatctataaaaaaataaaatttttcgctagtatgataatagactatttctaaatttttttcaactaatttgttaaatttttaaccttaatttttatttagaaaaaatttcctatattaattgtaaaattcttgagaaaattcttgcaaattttcttattcttcttgttattttctatatattttaagttaattgtgtttctatcctctttttttaccgccatagtttcttttcctgctgcctgtttatccgttatatcttcgtcagctgcctgcttatccgttgtctgtgtatcaccggtctgttgtgttgttacacaagcagcatcacagtaagaatcttcggcagcatctgaaaccgcatactccaccagactctttgcatcagcccacttatagtttttattgtttggccacccacagcccaagagagaaaggcacattctccttccatccttttcaactgctgcgacatagcagtagcctgcctttgtggtaaagccggtctttcccgatatgcagtagtccgtctccgtaaggagcctgttgtgattgttaaaaaccatctgaccttcctctgtctcaaacgtgtactgcatagtctgtgttatctcaagaaactgtgttgattttggtgatttccacgcacaataagacattataacacacaaatctcccgctgtggagtggtgaaagcttatatcattctcagcatccagcccatttggtgtaataaaatacgtgccgagacaccctatctcatttgctttttcattcataagctttgcaaagccctccgtcgagccgcccacatgctccgcaatcgcataggcacagtcattgaacgactccagcatcatgccatagagtaaatccttcatattatagctattcccggccacaagtccaagcttgaccgccggctgtgatgcggcattttgtgaaatcgtaacagtatcatttatatcagctttttcaagtgccacaatgcacgtaagaagctttgtggtactggcatttgccatgctgtctctcatatttctgccatatataaacgtctcgtcatccgcatcatataatgccgctgaaacagcatgaagctttggttcatttacggctttgtctgtatttttagcaacagtattttcagccgccataaacacacttttcttttccaaaccgggcattttttgcttttccagcgacttaaaatcaagcaaacagctgacagtacaaaacaacacacaaatgaaaactattaaagctattttcgacttatatttttttaaaaaaataatcatataattacctccatcggtaatatatatgattatttgcatgtccatattatatgaaatggcagcttacgcaatacacctgcactacacatcaagcttcacgtgcatctcttcctctgcctcctgcttgaactcctcaacctgcacagggcttaataccggcagctcgtcgatagacgaaaccccaaagctccttagaaattcctctgtggttccaaacaaaagcggccttcccggagcatcaagccttccaagctcctgcaccagattgtactcgacaagcttgcttatggcatgttcacttgacacacctctgattttttctatttcagcctttgttacaggctgcttgtacgctatgattgaaagagtctctaaaagcacatcagtaagcaccctcttcttaggctgctttgcaatgcggatgagatattcatacatctgtggctttgtacacatctgataagccccatcaagctctatgatattcatacctatatttgaagagcttctatactccttaatcagctcgtcaagcagcttttttgtttctttttcatttaattgtattgcatcggctatccttccaagctccacggattctcccatggtaaataaaatagcctctattgcagctttataattcatatatcatcaaaccctctttatgcagcaatccttgactcaatccggatatcatcaaaaatatgctcctgaacgatagttaatttgccggtcttcataagctccagtattgcaagaaatgtaactatgacttccactttgcttgacgatgcagtaagcagccctctgaagctgaagtgcttgtgtgaggcagcatagtctgtcagatattccatcttttcctctaaggagacctcttccttttcaatctttccaaacttcgagcggaccttatctatcttttcttcctgtctcttcattatactttgaaagattctgtttaaatcagaaagccgtatatctccgacaagctcctcaagattaacaggttcctcatatgcaaggacctcatcaggtatgtccttcttcttataccacaccttgccggcatccagctggcgatccttaagctcatttgccatgcacttgtacatcttgtactcaagcagctgctgcacaagctctgctcttggatcttcctgctcctgctcttcttcctctttctttgggagaagcatctttgactttatgtcgaggagcgtagctgccatcacgagaaactcgctgagcgtgtccaggttatcccttttcatctggtccacatactccatgtactgcgctgtaatctcgacaatcgggatatcataaatatttactttatttttctctatcaggtataaaagcagatcaagcggtccctcaaacacctgaagcttaaaagtcatatccataatttttactccgttaatccctcaaaaactgtgccataacgtaattggctacatcctttcctctctccgataaatagatatgcccgtcctttaccacgagcagctcctgttttttcaggctgtctatcgtatccttgtagattgcatctatcgaaataccaaatgccctctcaaaggcttctcttgtgaccccctcattcatacgaagtccaagaaacataaactcctccatctgttcctttttgtctataacatcagctgccacatgcagattggccttaaatatatcatcacccacatcatgtatatgacggcagctcgacagatattcatccatatcggatgtattgttatatctgacatttgatataagcgatgccgcccctattccaagtcctaaatagtcagctctggtccagtagcctatattatggcggcactccatacctcttttagcatagttagatgtctcatactgcctgtagccggcatccataaacgccttctgtcccgccttttccatatcatataactcgtcctcgttaggcagaaactccgttctcatgcccgcctcctggcgcaccatgtcaaccttgtacttttcatagaaaggagtacccttttcaactataagagaatacgccgatatatgatccggattaagccttatgatcttgtttactgtcgccatatactgtgacgctgactgtcccggcagaccatacatcaaatctacattgatatttttaaaacccacgtttctggctaactcgtaattcgtcacaaactgttcaaaggtatgtatacgcccgagccgcttaagctcatcattatttgccgactgcagtcctatggacaggcggttgattcccgcatccatgtatgctaaaagcttttccctgctaagcgtaccgggattgcactctatggatatctcagcatcaggcagcacattaaagcagtcaaacatacactccatcaaagcagcaatccactgctcatctatagagcttggtgtacctcctccgatatagacagatgacacctgatagttcttcataagcgggccgtaaaatatcatttccgccataagtcccttgacataacgaagctttgcatcatcgtctgctggaaatgacaaaaaatcacaatattcacattttctcacacaaaacggtatatgaatataaatctcaagattcttcatatgtgcgattactcctcatccagcttaagcacactcatgaatgcctcctgtggtatctctacattgcccacctgacgcatcctcttctttccttccttctgcttctcaagcagcttcttcttacgtgaaatatcaccaccgtagcacttggcaagcacatcctttcgaagcgctttaaccgtctctcttgctataatcttaccaccgactgctgcctgaataggtatctcaaacagatgcctcggtatctcgcccttaagcttctcgcacatcttacgtcctctttcgtatgcactctccttgaatacgataaatgaaagtgcatcgaccatttccttattgattaagatatcaagcttgacaagctctgagcgctcataatccttcatctcatagtcaaacgaagcatatcccctcgagcgtgactttaaagcatcaaagaaatcatagataatctcatttaatggcaagtcgtactttatgagagctcgtgttttttcgatatactccatgctgatatagactcctcgtctctcctggcacagcttcataatcgcaccgacatagtcacttgtgaccataatctctgcagatacgtatggctcctccatatactcaatctctgacggatccggcatatttgaaggattggtcagatctatcacctcaccgcttgtcttgtgaatcttgtaaataacactaggtgcagtggtaacgagatccagatcaaactctctctccagtctctcctgaataatttccagatgtaaaagtccaaggaatccgcatctgaagccaaagccaagtgccagagaggtctcaggctcaaactgtaatgaagcgtcattgacctgcagcttttcaagcgcatcccttaaatcaggatacttagcactgtccgcaggataaagaccacagtaaaccatagggttgaccttcttatagcccgggagtgcctcatcgcacggtctgtcaacgagtgtaactgtatcacccacgcgtgtatccctgacatttttgatgctggccgcaatgtatccaaccataccggccgaaagctcatcgcatggtataaactggcctgcgccaaaataacccacctctgtaaccacatcagatgcacctgtagccatcatctttattgtgtctcctacctttacagagccctctctcagtcggcagaaaataatgactcccttataagaatcatatgttgcatcaaatataagtgccttaagcggtgcatctttatcgcctgttggtgccggaatcttttttacaatctgctccagcacatcctctatattgagtcctgtctttgcggaaatacgcggtgcatccatagcttcgataccgataacatcctcaatctcctgtgccacctcatccgggcgcgcactcggcagatccaccttatttataacaggaaatacatccaggtcatgatccagtgcaaggtaaacatttgcaagtgtctgtgcctcaacgccttgggccgcatccactacaagtatagctccgtcacatgccgcaagactccttgatacctcatagttaaaatccacgtgtcccggtgtatctatcagattaaaaatatactcttcgccatcctttgcgttatatataatacggactgcctgagacttgattgtgataccacgctctctctctaaatccatattgtcgagcacctgagcctgcatctccctgctggtaagtgtgcctgttttttctataattctgtccgcgagtgtagatttaccgtgatcaatatgggcaataatacaaaaattgcggattttgctctgatctattgacatatgtcctcctaatgctttcaataactcatcaaagtttatcagatttgtgaaataaagtctatattattttaacactttatcaagtatatctgcaagtggttccattgcattgtacgcctcctccttggtatttgtctgcgctcccacctccacgagcagcgatttcggacacagatgcatattatatctgtagccctttaagtatatgcgccttgcaagccccggataatactcatttgccatgagctgcagctgaaatgaaaacgccagattatcccccagatactcattgggcagactattaatcggtccccttgcagcagtgcggcacagcccgttaaaaaacataatctgtgccataggctttccatctattgtggcagcaagccttgtagtctcagccactccatccctgtgcaggtcaataaccacctttatagacggatttttctcaataatctctgtaatctcaggaagtgaattggaatacgcatggtcgcggtcattcacatcatactgccccttgtgatgcagcacattgtagccgtatttttccctcaaaagtgattcaagcctgtcacccactccaactacggtctctgcctctgatgtatcaagggaatcactgtacccctcctgcgaatgtgtatggtatatgagtatatcaggaccgttgcctgacttttctatagacatatcacgcccaagcaaaacctcctcacacagctcatcggctcctatatatgtagtcttgtccacctgataatagttttttaccagattgtcaaagctcatatctacctgcggcattttcacgttctgctgctccttgagctctgctagctcaccgtttttttcagcttcatcaacaaatgccagctggtcggtatccggcagcatattgttcctgacacttgcattttcattttccatcgcagcaagctcctcatatgagagaatacctcctgctgtatcctcatcctccacaatacgcagctccttcttttttgagtcatcacactccttgtcagaatatgtaaggtgcggaaatttttcttccacgaacttctttcccacaccatcaccgcaaaacagcatagacgcaatatatataaatgctataagcacaatcatttttttcttcacaatatcatctcccatctaaagcatcaggcagcccctgctacataaagcttatgcggctggccctaatgatattcgaagcaataaaattattcactatagtcatcatattcatcgtttgaaaaagccatatttatgccctcagacaaaagccctgccagtctcttaaccgtctcgtcaatatccttcggcgtcacaaacatgccgtttaacttaggcgacatgagctttgcggtgttctcccggctggcatttaccgcatctgaaacaatagtcaccgcatcaatgactgtcggaataccaattgcgataacaggcactccgagattgccatggttaataccgtccctgtggtttcctaccccgcttccgggcactatgcctgtatccgtcagctgtatggtacagcccagcctctttgtactgcgtgccgcaagcgcatcaattgtcacaacaaaatcaggcttcacctcgctcaccacaccctttattatctcaaggcactccatgcctgtctgagccatcacgcccggcaccaggccgcacacactgtttacattctcgttgctaaacgcatacctgccatattcctttactatatggcgggtgataaacaagctgtcaacgcatcttggcccaagcgcatcaggagttacatttctgtttccaagcccgacaacaagtgccgcatatatacgcttgtcacagacagcctttacaaagctcttaagctctcttgaaagctccctcgtcacagcctgacagcactcctcatctccctcagacagcatagcagcctcaattgtcacatattttcctttaggacggcctgtagccctgactgcattttctgagtcaattgtcactacactgactatgattccattatccagctttttttcagagaaattcacacctctcatatctgtgtttgcctttttaaggctctcctgcgtctcaagcgccagatcagttcttgcacaccatttatcagccgacaaatcaatacacctcccctgtatgatattccaaaatcacatatatgttaattttttgcaatttttttcaaaatatgtattgacagagcagaaaggttgacatattatattctagtatgtttgtgccaaagcgtccgtgtctgttttggcatacattagattaaatatttggaggtgtacgagttggctaacattaaatcagcaaaaaagagaattttagtaacagaaactaaggctgcaagaaataaagcaatcaaatcaggagttaagacagcaatcaagaaggttgaggctgctgtagctgcaaatgataaggctgctgctgaggctgcattaaaggatgcaacttctgctatcgcaagcgctggttcaaagggtatcttccacaagaacaacgcagccagaaaagtatctcgtttaacaaagcttgttaacggattagcttaattactatataacaataaataaaaacccatcggtgccgtcataccgatgggttttttatttgcttttttgtatatttgcgttatatcatttactgcctgtcgcatgagtgccggtcatatctgcagagtactgcactataaaaagctccacagccatctggtcattcatcctgccggtcttcacagcctcctcatatgccacaccgtctctcacagccctctttaaatcatccagtgaatatgccctgcactgcgcctgatatttgcgcaccgcccactccggacatccggcctttgatgctatatccttgtttccaaagcccttatttgtcatggctttcacattcatcagtatattgaactggcgcgatataagatacataatacgcatggccggctctttaagtgccagcagatcgtaatacagctcaagcgcacgcttttgtttgtgtgatgcaatcgcatcaaccatctcaaacaccttgtttgtgatctgctctgtcgttacagcctcaacatccgaaagctcaatcacgtccttgtccatgcagtagcacagcagcttctcaagctccttgtcgatattttccatatctgtgccggttttttctataaagctgttgtaggcagcctgactcataccctttccatcttttctaatccttattcctatccatctggcaagtgtctcatccgtctgttccttgaactccacaggattaccgcacttggctgccgccttataaagctttgagcgcttatcaacgctctcctcaacaaatataaagtgcgtgctctcaggtgaatcctttaaatactctccaagctcatcgcctgcctttgaaaaaatgcctgcatcctctataagaatcactcttttatccgcaaaaaacggaagtgtctccgccaggtcaattatctccttctggttgattccatcgccctcaaacgatgaaaagttcatgctgtcgccctcacttaccatagcctttatcagcttgtccctgtactgttttatgaggtatctctcctgtccatacagcagataaacctttttgaaatctcctgcttttatatcattgtctattgttttcatatatagcactctctttatacttaatctgaccactttgcattgtgtataaaattcggcactttgcatccataagcctatccatggcttcatcagccggatgtccatagcggttctctgccgcgcatgatactgcagcccatcttgggcttaaagcctcaatccagtctgcagagcttgaatacttggaaccatgatgatttgccttgtaaaaatccacagaaagctcatccccatactcattaacaagcttcttttctacctcagatgatatatctccaccgaaaataccactaaacctgccatccgtgagcttcagcacaagacacatatcgtttctgtctaaggcagtatccgaagaacccggatacaggcacatgatgccatcagcttcttcatttgcagtactgcgcgaacctgatgcatcatttatttcaatcgaatccccctttgacataaggcatatatcaattcctgcatccttagctttaaaaagcagctcctccatagctttctctttagccgctgcttctgccacaactatatgctctatagtatacccactgtctatcacctcagacaatccgcttatatgatcactgtctgcatgtgaaacaaaccagtatgatatactctgtataccgttatacttaagaaacggcataatcacattctcgccaagctgttttcggtcagagcttcctccatcaataaagatacatgtgcctgactcaaagcggtaaaatatgccatctccctgccccacatcaagtatatcaagctgcgcagcagtttttggcttcacaagcaaaattgcaagcaggactgctgtacacaccactctttggacactgtaaaggatttggcttttttcttttgagccacactctacggcacgttttttaagcgcaaatgccaccaaaaagccactcataacagcataaaaaaggaaaatcctgtatccatcaggcgctcctgtaataaccgatgcccccggaagcttcataacaagactgcaaagcacctcatagagttttaacaccgcaaatgcaggaaacaccagcagtttgcctggcatcacgccaaagcagcctgcgacagacgaaagcagacccgaaataaatacgacaggtaaagccggtatcacaatgagatttacaaacaccgcaaaaagaggcagctcataatagttcataaccacaaccggaagcatcggaagctgtatggatactgatgcccagaatttcccgcccttaggtgcactcatcaaaggcgtcacaatacctatagcaagtatcgcccctaccgagaacacaaatccggcatatcccaaaaccataggattgtcccacagcaggtaaatgaccatgatgccaagagaattgagcatatctgtgcatctgcctaaagctgccgcaagcattgtaagtatgaacattcccacggcacgccttgtagacacggcatttcctgtcataacagcatagcttagtataagtgccgcagaacagacaaatgccgctgtatagctcacccttctttttctgagaagcttgtaaaaggccatgccaactatagaaatatgaagtccggaaatagccagtatatgtgaaataccactgacctggtacaaatcctttatctcatcatccagatacgacttgtctccaagcagcatggacgaaagcactcctgccgttgtctcatcagtcacctcaagaagtgaagctgacagcgtatcacgaagtttttcaagtctgtggtaataccatgcatgtttaccggcgcttgtcctaatactgtctgccttcaccgagaaatcaattccctgcgagtggtaaaagcgcgctctgtcaaactctccctcattggttgcagacttaaacaagcctatcttgccacaagctttcatataatcgccaagatgtgcgcttttgctgtcacagtataccacgacatcaccacaggatatttttctgccaaaagccctgccgtacccgggctgcactacgcagtccgtcatataatacctgtatgagaaatacttgtattcagttttataaatcttcccccagacgatgacagatttttcatctgtcatatactgcatatagccgtcacggttttcttctaccgaagtgtatctgaattgtgctgtggcaaaaacagctgacgatgtcaggataagcaaaacaactatgcgcctgataccggaaaggccgcccttagacaccacacactcagctattaaaatcacaagcagaatggcaaaggccaaaaacccaaagcccctgccatacataccggaaacagttcctgcagtatagaccaacgcaaataaaaacatcggtcttttactaatactcttctcctcctaatccaatctattctatttttcagttttttccgtggaatcatcagaatccactatatccttattaaactcatacatgtcgcttagcttgtaattataaagcagcatgccgtcattctcaccgtcaagtgagatctgtaccttgtccacagtaggaagtgaggtgagtgaattaactatcgaatacagcaccacatcctctgtcagcttattgtcaatagtatttctgaacgaagagtcaaagttcagatagcatattctatctgccacagacacattgataagctttgttgtgcccggaagagttgccttgagcttagagcccttcggtccctcaataagctgctcaacaacaagcttttcaagcgctatatttgagctgtaatgtatcactctggtctgtttttcaagccctgtaccatccttgtcagcaaaataaagcgtgagcgtctccttcacacttgtattaatctgctcacccggattctcaacaaaatcatcagcacccatgctaccgacaatctcatcatccgagtccacaagaggaatactgtttacggtaaatgtcacatacgaaatactatccagctgtgtaagcgtgcggactacagaagctctcaaaagcacctcctgcgcagccgtaaggtcataatactccttgctgaaatccacagtacagttatagtttttctcctcatgacctctcacagacacctcatccggaatcgccttgcgcagtcttgagtcttcaggcttatcctgcagtcttccaagaagctcatccacctgcttgtccacatctgagtttttgcttctaagcacatatgactccggcacactgctcgtaacatccatattcagacaaaacacctcaaccgtattgtccgcttttttctttgtgcagccgcccatggagagcagaattactgcagtgagcacgaatataattattcttttcacgtcaagcctcctatacaatatagttgagcggtatacgcacatcaaaggtagtgccctctcccatcacactgtgagcctttatagctcccctatgcataagaatagagcttcttgtaatggcaagtcccagacctgtaccgccaatctctctcgaatgcgacttgtccacgcgataaaacctctcatagatgtgctctaaggactcctccggtataccgataccgttgtcctccaccttcagatagaaatactgatggtccgcatttaaggatacatgaacatagccaccggtctcgttgtcattgtacttgattgcattctcaatgaggtttgtaaaagcaagcgtcagcttcacctcatctatctctgcagttaccggtctgaagctctcgagtacaagctccacctgctgcttgtcagcaatcggctgaagtctcttcataatctgctcgagcaggtcattgatattaacactctcgatattaagcgtagcagccgacttatccatcttgaccagtgataacaggtcatttattatctttgtctctctgtctatctcgcttgtgatatctcccatgaactccctgtacatctcaatcggagcctcatcacccatgctgttgatggaatctgcgagtaccttcatggaagtaagaggtgtcttgagctcatgtgacacattcgatacaaactcctgtctggactcatccatgaccttcattccgctcatcagctcattaaaattcctgcttattatagcagtctccgcatagtcatctacatccagctgctcttttccaaagccatccttaatgtctgatatctcgtcagaaagcttcttaatcggtacaaaaagatgcaaaagcacaagcacaccaaaaaagagcaccaccgcacctgcgataatggcaacagtcaccgcaatctgtgtcagatacgacatatttagcgatatattgtccgtcgacacacttacaacaagtgctccctctatctttgaatccttgtcgtttggattgctaatcggaacagaaagctcgatatagtggtttttagaatcatagttcgtaatctctgaagctgagaaggtcttgataacctcctctgagacaatagtattgccatcatctaaattgtaagtatccttaatgatcttaaaatgcttgtcaactatgagcacacgcccctcatatatagtagtaagagtgtcaatctgagcatcaatattgctcaagtcaccgccatcctcatcaaagtatttacttgtggatatcttgtttgcgagaatctttgcctgactaagcacttcgctttcgcggattgaaaccgccctggactcgtaggtgttaagtatgccgaagcatagcaccacctccggtaccagaacgagaacaaaaatcatgaaaatcagcctggatttcagactcttataaaatgcaaaatgtactttactcttaaacattttagaacctttctgaaagtattacttctggttgtagtaatatcccacaccccacttggtatgaacgtacttcggctcgcttggatttgcctcaatcttttcacgaagacgtctgacatgcacatcaaccgtacgcacgtcacccggataatcctcgccccatacaatctttaaaaggctctccctactgtacactttattttcatttttgatcagaatctcgagcagctcaaactctcttgcagtcaaattgatttcattatcatttatgaacagacgtctgctgtcacagtcgagcttgatatcacccttttcaattacagatgactgtacctgtggtgcgcgttccggtgaagtgcgccgcattattgccttgattctggcctttacctcaagaatattaaatggctttgtgatatagtcatcagcgccgtactcaagtcctaaaattttgtccatgtcatcgccctttgctgtgagcatgacaatcgggacatcagaaaactcccttattgcctgacacacctcaaagccatccatctttggaagcatgacatctaaaagaatcatatcatatgaattggccttcgccatatttaaggcctcctcaccgtcatatgcgcagtctacctccatgccatcctgcagcagactgaaacgtattccttttacaattaacttttcgtcgtcaacgaccagcactttttttgccatttatacactcctaatttactgttatatcatcttttattttattaaacattgcttcaccaatgccggacaccctcgtgatatcctcaatcgaagaaaacaatccatttttagcgcgatcttcaacaatactctttgccttgctctcaccaattccggaaagagccattagctgctcgacagttgcggtattgatattgagcttgccatcctttacgcctatatgctcctcagcgccgcccttcatcagcgagccatctatgccggtggtatatgtgccctcaggtatgtgatccgacttaagctcctctacagtcgggaaatacagcatctgcccatcatacagctctgatgccagattccaaaagctcttgtcagctgtttccagcatgcctcccgccatatcaacgagctcacaaactctcgcgcccggctttactctgtatacaccgggattggcaacctgaccacagatatagacgcaccactcagtagattcatcagtgtcatctgctgtgtcttttgccttctgctcctgttctccatcggatgaagctttcttctccttggaatcagcagtctgtctgtttacatcacttgaaaccacagcagtctgctccgtttcagaagcaaaatgaactgtggcatcatcctttttacagccgcaaaggccaaacgctattgttaaaataaacgcacttaataatattatttttttcatatggtctcctttgattaatatcataatctcaaaggagaaatcgatgtcctctttattttacagactttttgacagtattacaagtgttgtttcaagtttttctatcatttcgtcaacatcactcttttcgataacaagaggaggcacaaatctaagcacattgctgcctgccgtaatgactataagcccttgatttaaagcctctgctgagacctttcctacaggaaggctgcactccacgccctgcatgagtcccatacctcttctggctgtgagacaatcgaattttgcaacaagctcatcaagcttcttctccaggtaaggtgcaacctcctttacatggcttactatatcaagacgcttaaactcatcaaacactgcacttactgcggctcctacaaacggattgccaccgtatgtggtgccatggtcgcccggtgcaagggatttgtctgccaccctctgtgtcatgagaaaggcaccaacaggcacgccacagccgagtgccttcgcacaggtcatgatatcaggcttcacatcatagttctgccatgcgaacatctcgccacttctgcccatgccgcactgtatctcgtcaagaataagaagaatatccttttcatcacagagagctctcactccctcgataaactccttctttgccgggtaaataccgccctcaccctgaatagtttccataataatggcgcaggttttgtctgtcacctgagccttaacactatctaaatcattgaaatccgcaaacttaactcccggcataagtggctcaaacggctcctgataatgtgcattgccggtgacagaaagcgctccgatgcttcttccgtggaaggaatggttcatggcaattatctcatgacctgcatggccgtctcttgtaaaggcatatttctttgcagccttgatagcgccctcaatagcctctgtaccactgttggtaaagaaaatacggtccatttcgcttgccttaagcaccttgtctgccgcctcgatgacaggcgcattgtagtaaaggtttgatgtatgtaaaagcttatcaacctgtgcctttaatgcctccttgtggtgctcattgctgtaaccaagtgcacatacagctattcctgcggcaaagtccagatatgcattgccgtctgtatcataaagatgtactccctcgccgtgatcgagtacaagtgaaaatctgttgtaggtatgaagcagttccttttctgcctcatcaatgtatgactgtttatccatattattgctcattgttaaatttctcctccgaatctccaagaatagctgttccgattcctctgtttgtgaatatctcaagcagtaagcagtgtgcgatacgtccatcaagaatatgtactcttgaaactccgttatcgatggcatctatgcagttgttgagcttaggaagcatgcctccgccgataaaaccatcacctataagcttctttgcatctgagactgtaagctctgaaataagagtattcttatctgaagggtccttgtatacaccctcgatatctgtgaggaatgcaagcttttctgctgaaactgctcttgcgatagcacatgctgcatcatctgcattgatattgtatgtattgtattcgtcatcaagaccgattggacacacaattggaagaaaatctttctcgagcaggtcataaagaatttttggattgacatcagtgatttcacctacaaagcctatatcctctccgtttgaatactttttcttaacctttaagagaccgccgtccttgccgctcactccgacagcctgcacaccaagctcctcaacgagtgtgacgagagatttgtttaccttattaagtaccatctcggcaatctccattgtatcggcatcagtctttctgagtccgtttacaaatacaggctccatgccgacctttcctacccatttgctgatttccttgcctccgccgtgtacgatgataggcttgaagccgaccagcttgagaagtgtgacatcctggatcacctgctttttaagctgttcgtcaaccattgcagatccgccgtactttacaacgataatctttctgttaaatctctgtatatacggaagtgcctctatgagcacctgtgccttttccattacctgttccatgttcttatctgccattgtactgctccttatttgttaaatcttgttatattttcttcgttaagtgtgaaatcatagtagtttaggtcttctctgaatgtccatccctcttccttccagaagtggtttcccagctcattcaccttgaaggctatgattgacaccttgttgatatgctctgcctgaagtgctctcatgcaggcaaccaccatactcttcccgatgccgcacttcctgtaatgctcatccacgcatacatggtacaggcagcctcttctgccatcgtgtccgcagagtatcgctccaactatctttccatcttctaccgctacaacactcgtagtcggatttctcttaagaaatctaaggactccctctcttgagtcgtcaatagaacggattccaaagccgtggatggtctgccagaggctgtatacctcgtcataatcatctatcgtcataacccttatttcatatttattctcattactcattttattaaatcatccttatatttttatataactatcagcattataatgcatctttctgataattactttcctattattaattattacggaaacataggaaccatattgagtccctctgcctcatcgaagccaaataacagattcatattctgaaccgcctgtcctgcagcaccctttaccagattgtcaagagctcccatcataataattctgccggttctctcatcaatcacaaagtttacatccacatagttgctgccctcaacccactttgtctcagggcagacaccttttttgagcactctgacaaacttctcatttgcataatacttatcgtaaactgccttaatctcatcatatgtaggaagtgttccatcaggctttttcttaagtgtcgcatactctgtagcgaggattcctctgttcatcggaacaagatgcggagtaaagttgataaagatttcttttcctgccgcatatccaagctgttcctctatctcaggtgtatgtctgtgtgaggcaacgccatatgccttcatgctctcatttacttcacaaaacagattaggtgtctttgcaccacgtcctgcgccagatgtgcctgactttgcatcgacgataagtgtatctgtatcaataagtccctccttaacaagcggataagctgtaaggatggagcatgtggtatagcagccaggatttgcaacaagccttgtctcctttgtgaccttatccctgtttatctcacacagaccatatacagcctcatcaataaactgcggcgacttgtgctcaatcttgtaccatttctcatatgtggctacatccttgatacggaagtccgctgacagatcgacaatctttaccttacttaatatatcctcagtgagcacgcctgccaaaaagccctgtggggtcgcagtaaaaatcacatcaacagactctgcaagctcctccatattgtcatccatgcactttgcatcaactatctgaaacatatttccatagatatcggcataattctcatccacatagcttcgtgagccataccatgcaatctctacctctttatgattcatcaaaattctcacgagctccgctccggcatatccggtggctccaataataccagcctttatcatagtatttcctcttttcatattgtatttctgcataaccatataaaatgggtctgacgcatcatacataataatatagtacagtaatttcaatccgtaaagagaaaaattatacaaaattatgtatatttatacatgaataatgtatattttttcacttgcaatatgtaaagaactggtatatatttattctaaagtaattattcaaggcttttagacacaaaagcagttaatggttaccatcataaagaataaacgaaaagaggacacgcacttatgaaagacaaagttgtattagcttattcaggcggacttgataccactgctatcattccatggcttaaagagacttatgactatgacgtaatctgctgctgcatcaactgcggacagggagaggagcttgacggactcgatgagagagctaaattatccggagcttcaaagctttacatagaggatatctgtgatgagttcagtgaggactacatcgtaccttgtgtacaggccggcgcagtttatgagcacaaatacctccttggaacagcaatggcaagaccgggcatcgcaaagaagcttgtagagattgcaagaaaagaaggcgctgtagccatctgccacggtgcaacaggaaaaggaaacgaccagatccgtttcgagctcggtatcaaggcgctcgctcctgatatcaaggtaatcgctccatggcgtcaggacaactggaaaatggattcacgtgaggctgagatcgagtactgtaaggcacacggaatcgaccttccgttcggcacagattcaagctacagccgtgaccgtaacctctggcacatcagccacgagggacttgagcttgaggatccttcacaggagccaaactatgaccatctgctcgtattaagtgtcacacctgagcatgctcctgacgagggtgagtatgttacaatgacatttgagaagggtgttcctacatctgtcaacggcaaaaagatgaaggtagcagacatcatcagagagcttaaccgtctcggtggcaagcacggcatcggcatcatcgatatcgttgagaaccgtgtagtaggtatgaaatcacgtggtgtatatgagactcctggtggaacaatccttatggaggcacatgaccagctcgaggagctctgccttgaccgtgctacaatggaggtcaaaaaagaaatgggcaacaagctcgctcaggtagtatacgaaggaaaatggttcacaccacttcgtgaagcaatccaggctttcgtagagtcaacacaggaatatgtaaccggagaagttaaattcaaattatataaaggcaatatcatcaaggccggcactacttcaccatattcactctacagtgagtctcttgcaagctttactacaggagatttatatgatcaccatgatgcagacggcttcatcacactgtttggtctgccactcaaggtgcgtgcaatgaagcttcttgaacttgagaacaagaaaaataattaattgttacaacaaataaaagaaaaagagatgtgaaataacagcaattatttcacatctcttatttttttaataatttcgttctcttctgtttatttttagtcaaaaactatttagctgtcggaagcttgaatgagctctttaatgagacgattctgttaaatacaggctgtccatcctttgagtccttgcaatccgcgcagaagaagccatttctgacaaactggaagctgtcataagccttggccttcataagctccggctccactacacagttatcaagcactgtgagtgaatttggattaagatttaggcttccgtcctcattgtacacaccaagctcctcatttacgatattctcgtaaagacgtacagttacctgctttccatactcggctgaaacccagtggatagttcccttgacctttctgccatcaggactgttgccaccctttgatgccgggtcatatgtacagtgaatctctgtaacattgccgttttcgtccttcacacagctattgcacttcacaaaataagcgttcatgaaacgcacctcattgccagggaacatacggaaatacttcttcggtggctcctccatgaagtcctctctctccacataaagctctctggtgaaaggaacctttctctttccaagctcaggattctccacgttattgtccacttcaagatactcaacctgtccctcagggtaattgtcgataatcaccttgaccggatcaagcacagccatcatacgagggcgcttagcctttaaatcctctcggatacagtactcaagcatagcatagtcaacagagctgttagcctttgatataccacacagatcaacaaaattctggatagactccggtgtgaagcccctgcgtctgagcgctgctatagaaacaagcctcgggtcatcccagccatcaacgatgccatcctccacaagacgcttgatatatctctttcctgttacaacattagtcagatagagctttgcaaactcaatctgctttggcgactcctcaggagaattcttaaatccacattcaataaccacccagtcatacagcggtctgtggtcttcaaactcaagagtacatatagaatgtgtgataccctcgatagcatcctctataggatgagcaaaatcatacataggatatacacaccatttatcacctgtattgtgatgtgtcatatgagccacacggtaaagaatcggatctctcatattgatgtttgaagagctcatgtcaattctcgcacgaagcacctttgtgccatcctcgaactcaccgtttttcatgcgctcaaaaaggtctaagttttcctcaacacttctctttgagtatggatcctccttgccgacctctgtgagtgtacctctatactctcttatctcatcaggtgtcaggtcagatacatatgcctttcccttctttatcagtcctactgcacactcatacatcttgtcgaaataattggatgcaaaaaacttcctgtcagcccagtcagcgccaagccacttaacatcggcctcaatagactctacaaactccagacgctccttggtagggtttgtatcatcaaacctgagattgaactgtccgtcatacttctttgccagtccatagtttaaaagaatagacttcgcatggccgatatgtaaataaccgtttggctccggtgggaatctggtctttactgtcttgcaatgcccctctgccaagtccttctcaataatctgttcaataaaatttttcgaaactgttgcctcgttctccataaatgttcctccgaaaataatactgtgtccattataaattcatcagtttactttgtcaatgaattagaaaaagtagtgcatgtatgttatacgtgcgtatgtgtaaacagatgatcctgacagtattccttgttgccggtgcacttcgagcagtatctgaatgttaattcaggatttgacaattccgttctgccgcatatatagcacttatggcgtgagatgccactgcccgggcgaggttcggaaaactgagccttaaactgtgcctttctcctcttctggtgcatattctgcctgaatgagagcctgtgcttgcagccataaatgaataccaacagatttataagtgcaagtacgatttctgagccgtatgccaatccaatctgccatccaaagctcatataagtatacacatcatatgcaaacatcacgaagtaaacaagcaccatccacttcatctttataggaagcacaaagtaaagcctcacctctgcctccggcatcaaaaggccaagcatcagatacatagctataagtatatagtacatagtcagattgatggatacatgtgtcactgcaaatacaagcattccaactatatcatacagtaaaaagcctccgaaaaagtacacattcatcctaaaagagccaagatatgactccatgctgtctccaagcgtccacagacagaatataaataaaagctgtaaaaatgatatgctgccgctcggcacaaaaatccagcttataagacgccatacctgtccgtgcaaaatagcagaggctgaaaactgcagataataaaggacgacatctccctttgtcaaaagcagcacactgcctatcagattcgcagcgataaatattctagtgatattcggaatcgctttacttccatatttttgttctagtttgttaagccagttcatacattttagcagacatggttttgatgcaataaaaaaccacgcgtctgcatcctcctgtcatattattgctgccttttacactatagtgcaaagggcagcgattattacaaaatttattatgatagttaaatcatactttgtcaacgagacagcgaattattcacaaattctttataattatagtcattgtaatttgtcgatatctgtcgtataataatctctgttttgaaaatagaactattatatattttaataagaagaaagatatataaaaacatataagtaatacattatggaggaaccgctatggaaaataacagcttacataagttgggtattgatatcggctcaacaaccgtcaagattgcacttcttgacgccgatgacaatatcctcttttccgattatgagcgtcattttgcaaatatccaggagacacttgagtcccttatcagaaaggcctacgacaaaacaggtgacctttcagtttgtcctatgataacaggctccggtggactcactcttgcaaagcaccttgaggtgccattcgtacaggaggttatagctgtatctaccgcactcacacactatgctccacagaccgatgtggcaatagaactaggtggcgaggatgccaaaatcatatacttcgagggcggcaacgtggagcagcgtatgaacggcatatgtgccggcggtacaggctcatttatcgaccagatggcttctctcatccagacagacgctacaggactaaatgaatacgcaaaaagctacaaggccatctaccctatagcagcccgctgtggagtatttgccaaaacagatatccagcctctcatcaatgagggagccacacgcgaggatttgtcagcttctatctttcaggccgtggtaaaccagaccatcagcggcctcgcctgcggtaagccaatcaagggacatgttgctttccttggcggtcctctgcactttttgtcagaacttaaatcagcatttatcagaaccttaaatctcgatgacgagcacactatcgttcctgaaaactctcatctgtttgcagcaataggctctgcattaaactataaagacaactctgtcaccacactctcatccttaatcgaccgcctctcaaacggcataaagatggaatttgaggtagcacgtatggagcctctttttaaggatcaggctgattacgatgaatttacaacgcgtcacggcaacaatcacgtaaagaccggtgacctttctacatacaagggcaactgctatctcggaatagatgcaggctcaaccaccactaaaatcgctctcgtaagcgaggacggagaccttttatactcattctacagcaacaacaacggaagccctctcgcgacagccatccgttctatccaggagatttacgcaaagcttcctgaggatgcacacatcgtacactcctgctctacaggctacggagaggctttattaaaggcagctttaaaattggacgacggcgaagtagagactgtagcccactactacgcagcggcattcttcgacccaaaggtagactgtatcctcgatatcggtggacaggatatgaagtgcatcaagataaagaaccagactgtcgactcagtacagctcaacgaggcctgctcttcaggctgcggctcatttattgagaccttcgcaaagtccttaaactactcagtacaggattttgcaaaggaagccctttttgcaaagaaccctatcgacctcggaaccagatgtacggttttcatgaactcaaaggtaaagcaggctcagaaggagggcgcatctgtcgcagatatctcagcaggacttgcctactcagtaataaagaatgcacttttcaaggttatcaagctttctgatgcaagcgacctcggtgaaaatatcgtagtccagggcggtactttctacaatgatgccgttcttagaagctttgaaaaaatagcaggtgtacatgccacaaggcctgacatcgcaggtatcatgggcgcctttggtgccgcactcatcgcacgcgagcgccatgaggctgattacaagacaacaatgctcaccatcgaccagataaacgagctcacctacaccacaaagctcgcacgctgtcaaggctgtacaaaccactgtcttttaactataaacaaattctccgacaacagacagtacatcacaggaaaccgctgtgaaaagggtctgggcaaagagaagaacaaggataacatcccaaatctttttgaatacaagaacaagcgtatatttgactatgagccacttgacccaaaggatgctccacacggtacagtcggcatcccaagagccttgaatatgtacgagaactatccgttctgggctatatttttcaagcgtctcggcttttctgtagtactgtcaccacagtctaccagaaagatttatgagatgggtatcgactccatcccaagtgagtcagagtgctaccctgcaaagctcacacatggtcatataagctggctcataaaacaaaatgtagattttattttctacccggcagtgccatatgagcgcaaggagtttcctgatgcaaacaatcactacaactgccctattgtcacatcatactctgagaatatcaaaaacaacgtggacgagattacctcaggcgaggttaaattcataaatccgtttatgtcatttgagagtgaggaaactatctcacagcagctcgtagccaccttctcaaagggtgatttcaatctgcctgagtcacagattcgtgatgcggtagccgcaggctggaaggagcttgccatgacaagacttgagatacagcgaaagggcgaggaagtgctcgactacatggaagacaccggacgtcgcggaatcgtgctcgcaggccgtccgtaccatgtggacccggaaatcaaccacggtattcctgagctcatcacaagctatggcatctgtgtgctgacagaggactccgtatcccatctgggcgagcttgagagacctctcatagttatggatcagtggatgtaccacaccagactgtactcagccgccaactttgtaaagacccgtgatgaccttgacttaatccagctcaactcgtttggctgtggtctcgatgctgtcacaaccgactgcgtaaacgatatactgacaggctccggcaagatatacacctgcctgaagatcgacgaggtaaacaacctgggcgcagcaagaatccgtatccgctcgctccttgccgccataagagtcaaggaaaccaagcatgaaaagcgtgacttaaaaccgtctaactacgagcgtgttgtattcaccgagcagatgaaaaaggacaactacaccatcatctgccctcagatgtcacctatacactttgacctcctcgttccagcctttaaggcagccggttacaatatggtcataccggatatccctgcaagggaatgtgtggacgtgggacttaagttcgtaaacaacgatgcctgctacccttcactcatcgtcgtgggacagattatggcagccgtcaaatcaggcaactatgatatgacacacacagccatcctcatctcacagacaggtggcggatgccgtgcgacaaactacatcggatttatccgaagagccctcgaaaaggcaggatatcctgatgtgcctgttatctcaatcaacatggttggtctcgagaaaaacccgggctttaagtttactccaagccttatccagcacggactgtatgcacttgagtttggcgatatctttatgcgctgtctctacagggtacgtccttatgagaaagagccgggaagtgccaatgcactccatgagaagtggaaaaagagagtcatcgactttgtcggcaacacaaagatgctctctcacaagaaatacaaaaagatgtgccgcgaaatcataagggatttcgacaatctgcctatgacagatgaggttaagccgcgtgtcggcgtggtcggtgagattctcgtcaaattcctgcctgcagcaaacaactatgtggttgacctgctcgaagctgaaggagccgaggctgtagtgcctgatctgactgatttcttactctactgctgctacaacacgaatttcaaggctgactatctcggtgcttctaagaaagctaagtttatgaacaaccgacttatcgccttcttcgagtggctcagaaaggatgcaagggatgagctggctaagagcaagcattttgagccaaccgctcacgtgcaggatctcgcagagtatgcatctcctatcgtttcttgcggtaatcagaccggtgagggctggttcttgacaggtgagatgcttgagctcatcaatgagggcgtcacaaacatcatctgtgcacagccttttgcatgcttaccgaaccatattgtgggtaagggagttataaagagaatcagacatgatcatccggatgccaatatcgtggctatcgattatgatccgggtgcttctgaagtaaaccagctgaaccgtattaagctgatgctttctactgcacagaagaagcttaagaaataaaaaattcgcccatgcattcatgcatgggcgttgttggttttcgtatgcaattctacagactctaagcactttttaattaagcttggatttaagttcttccatccttgtatcattcagcttataaaacctcttaaatacaaatatgcccacaatgagcagaataacagacggaatcgtcatccacatacgaagagcatcaagtgtatcctgtgtctgtaccgcagccgcggtatccagatgtatccagtcaaccaccagcccagccagaaataccgctacaccggatgcgagctttaccgtaaatgtctgcattgagaaaatgaccgactcctctctcgtgccattcataacctcaccataatcaacagaatccgaaagaaatatagtcatgataacattgagcataccatagcccagataaatcaaaatacccggcaggcagagtatgtaccaactctgcggcgtgtagagctttgcaaatgccatgataagtatcaccgcaaagcctgctatctgaataataaatcctgatataaaaagctggcttttactgaatctcttgcgaagcagcggtataaccatcatgacaagcacctgtgctgcaaaagcaactgcagcaaatatagaatatgcgccctcgtttcccacatcaaaccggaagaaataaagcacaaggttgccacagatattgagtgatgtatacacgagaatgattgataccacaacagtcatagcctggtcgttcttaaataaggctttaaacatatcggatatctttcccggcttctcatcacaggcaaccggtctttcaggcacacatgccacgcatacaagctcagaaatcacaaatactaccgctataataagtgcccaccacttaaatccaatcctgtagtcagccatagagcttcctgcaccaagaataggcaccactgtcatcgtgagcaccgtagggatagcatctccaatgccagagcatgtcctcgcaagcgatgtaagctgctccctgtcgctgcccggctcagtgattgcgggaatcatagaccagaacggaatatccataagcgtatatgtgatgccccatgcaaagtaaaacactgtaagccacactctctgcgctgaatcacccatagactcaggagtggcatataaagcatatatggtcacggcattgagcaccgtgccggcaaaaatccaaggcctgaacctgccccacctggtacgcgtctttgctacgataatgcccatcaccgggtcattgaacgcatcaaaaatcctcgccgccatcatcaccgtgccgataaacacactgctcatcccaagcactacattgtaatagtagagcaaatacgatgaaataagcatatacacaatatcttttccgaaggcgccaaatccaaatgcgcacttttgtcctgttttaagcttcatagaaatacctccaaaataatcagctatcccagcctctggtataaagtaaaaataatttacagcttctcaccaaccaccctgcaccgcttcctgcaaaaagcaatgccataggctaaaatatcacaccggtcctcatcccgcaaagcctcatcatagcgcttattcttaatctgtgccatcgcagtctcgcatgctgcgtcaagctccttcatctccttagcatacttcacctctataacgatcccagcatccggatcctccggctcaatcaaaatatcactaaagccatctcccgactcacgattggacttaatcagccagtccggattgctgccacgcagtagaccgagaagtaagccatgatagaaattctccttcatagcatcaggcgccttggtatcgagtatgctgatcatgcggctcataacgatattgagctgcctggtaatctgtttctcatctttatccagaattgcctttgataaaagcttcatagtatcatcatcatttgcaacaacagccttgaaccactcctgaatctggagaataaacacctcacgcacctctttattaggaatcacaagcttataggcatagctctcactgtcaggcaccttgacctctccgattttggtgagatagcctgtggtaaaaagcacactccacagattgtcaatagtattgtcaatctcatcatatgtcagatcaaggcgaagctgcttctctacaaatccgcctgccacgagcttttcaatctcatccctcgtggtccggtcagccttgtccacaaagcgcttcaccatatcattgccactactgttaatccagaacgcactcggtctggctgacggatctgaaacaagcttcttggcaaaattaatcacatcccacggacaataaatatccgcattaccaaaatgatagccatcataccattcctttgcatccgggtacctctcgctcctgtcatagtctaaaagcagcttcataacctcatcatcagtgaagccaaactgctcatcatggtcgatatccacaatagaattgatttcaaaattgttgagacctgtaaaaatactctcctttgacacacgaagacagcctgtgagcaccgcaaactgtaaaaactcattggtcttaagcgcctgcccgaaaagccccctgataagagaaaccatctccttgtagtagccattctgaaaagccttgtcgagcggaacatcgtactcgtctatgaggataactactttctgaccatagtgcttatacaacagctttgaaagcattcgtatactatcctcaatattgtcatcctgcccatgaagcatctttgtaaacagtgttctatcctcatcagtcaatacatcactgttcttcaaatagtaatgtctgtcaagctcatcctttaaaatagcacacagcatacgtcttgccgtagtaaagtctaaaccatccacacccttgaatgaaagaaagatgacaggatacttcaccatatgctcgtcacacagctctttattgccggaaatgtataagccctcaaataaagctttgtccgttcctttttcaaaaaagctcctaagcatgctcatattgagagtcttgccaaaacggcgagggcgcgtaaaaagagtcaccttaccccagccctgtaagagctgctctataagccttgtcttgtcaatataatagaaacccagtttacgaatttcctcaaaattttcaattccaaccggtaacttcaaattatgttgcagtaaattcaataaatcagtatcatatatttatacatacaaacagcgtagaagttttaaaatatgaatgcggaataaaacagaggataagaggatatgaagaacgatgaaccggagataaaaccggcatacaaaaatcctttaatagagcattacgagtgtgatggccagataaatatgttcaggtatctggataaataatttcatttatttgaagaggctggataaaaatgcagatatttgtagacgcagacgcatgtccggtagtggacatcatagagaaaatagcagaaaaatataatataaagacaactctcctgtgtgatacaaaccatgttttgtactcagattacagcgaagtgatagtggttggtgcaggagcagatgcagtggattacaagcttataagcctctgccacaggggagatatcgttgtatcacaggattatggagttgctgctatggcactgggcaaaggcgcatatgcaatccaccaatcaggcaggtggtacacagacgaaaacatcgaccggatgctgatggagaggcaccttaacaagaaagtcagacgaagctcacataagaatcatatcaggggaccgaaaaagcgcacagagaaagatgatgagaggtttgcacagtcgtttgagaaaatgatactgatggcaaaatcaaaggaagactaattaaggattggagcattacagatgaagacagcaatagtatatgcatcagtgcatcacggaaacacaaaaaagataattgatgagatagcaaagacaaacgatgtcgagctgatagatgcgacacagactgtagagaaagacttgtcggaatatgatttaaccggtttcgcatcaggcgtatatggtggaaagttccatcagtcggtgcttaagtttgcatcagtcaatctcgcagacaacaaaaatatatttcttatctgtacatatggcggcagacctgtctttaagtcaattgagcaggtgatagcatacaaacatgacaccattgtcggaaggttttcatgcaagggatttgatacgttcggtccgttcaagatgattggcggcgtatcaaaggggcatccggatgagaaggatattgcggcggttgtagagttttacaacggattaaaattaaagtatgattagaatctgtatattagtaaactatcttattgggtgttttacttgtaggtattatttgcagaaggaaggatatacaggcatgaaactaatttgctctttatttatcacattcttaaaaatcggtgcgttcacctttggcggcggatacgctatgattgcgctgcttgaaaatgagttcgttgaaaagaaaaaatggcttgaaaaaagcgagtttctggacatggttgcggtagtcgaatccacgccaggaccagtcgccgtcaacagtgcgacttacattggttacaaaattgcaggatttgcgggtgcaaccatgtccacacttgctgtctgcattccatctttctttgtaatttatgttatctcgctgttctttgatcagtttctcagtttgcgctgggtttcctgcgcattccgcgggattcaggtatgtgtgatctatctgatccttaccgcagggctgaaaatgcttaaaagtattgacaaaaacacactaaacttgacgcttctcacgttggtcatggcttccatgctctgctgctcgatcacagcagtttcgttttcctctgtgttttacatcctgatctgcggcgcggtcgggcttgttgttttctttctgcgaaaaatccggaaaggagatgggaaaacgtcatgatatatctgcgtctctttctgaactttttgatgatcggtgccttgtctttcggcggcggctatggaatggtttcgctggtacgcgaaagggtgctttccaacggctggctgacagagaacgagtttctgaattttattgccgtatctgaatccacaccgggaccccttgccgtgaatatggcaacctttatcggctcaacacagggcggaatccttggttcatttgttgcaacgctgggcgtggtgttgccgtcatttttgattattctcttaattgcatccgcactaaagaatctgatgaaatatgcacccgtcaacgcctttttatcgggagttcgtccgtgcgttgtagcgatgatccttgcgaccgcgctcagcatggcgctgtctacgctgtttggcttcacagatttacaggccggatttgcgcccgatttgcgctctatcgcagtatttgctatgctcggagcaacacatctgatttgtaaaataatcagaaaaacagctccatcgccaattctgatgatcctgttttcagcaggcctcggaatcttgttttggtgaatattctagcatggcgattgattttatttccaacttcaatagcaattcctgctgaaccgcgcttatttcattgcatataatttcgagcgacatcacccttcattcatgatgccgctccgcgcttcgaccataccattctgccacaaatgagctgaccatccccttatttaatactatagtttacgtctccgatatatcggtacagttgtagttatttgttttttcaaaaaaacagttcgtaaaattatacttttacgaactgtttgtatttttggtcagttttgcaaacttgaattgaaccaaatcgctgcgcgatggcctgccaaggctgtggcgcagtttttctattcctaaataaaaaagcagtggaaaccaagtcctacaagtagtattgttaagtcaccacaaccaacaatcaaacaggatcgtccactgctttttatttaggaaaagaaaaactgcgtcacagccttggcaggccatcgcgcagcgattttgttcaattccaatttatcaattacaggtgacattgaaagagtcagcccattcaaggtgctggctctttaaaaattccattctaataaattgcacgataacttataaaaaaatatgctccacattatggaaaaatgtatataaatatataaaagtatcaaaatcgaataattataaggacttatgcatcagacacacttttgcaaaaagggagttttaaaaagcatatgaatataaaaataatcttgacatacaagccacaaaggtttactatggttagcgtaagctaattaaataattattcttcagggcagggtgcgattccctaccggtggtatagcccacgagccgcaaggcatgattcggtgagattccgaggccgacagtaaagtctggatgaaagaagatgcgaatatgatatatgcagagtatagatagctgcgtttcagattcagtttcagatatagatacagcacatatcatagttataacagatatctactctggagtgttttgatacattccagatttttttgtctcaaaattcatttatgatgaaatgcagcttgtgcatgtttatctgagattatgatatttgaaatcattaggccctgaacgataatagttcagggcttttttagtgaacaaagaggtaaaatggagcatatatatctgcatgcttgcatgcaaggagatatgcgaacatttgacgacacaacataaatcgagaattgtagcagtgtaaactgcggagaagcttcgtaagaagcgaattcgagatgtatgttgtggaatataaaaaaggacaggaaaggaactcaaatgactgatgaacaatatatgagaagggcgattgagcttgcgaagcgcggcatgggatatacctcgccaaacccgatggtcggagctgtgatagtaaaggacggcaggataatcggagagggctggcatgagagatacggagagctgcacgcggaaagaaatgcgttaaagcattgcaaggaatcgccacagggagcggatatgtatgtgactctcgagccctgctgtcatcatggcaagcagccgccatgtgtggaggcagtgatagaagccggtataaaaagagtatatgtgggctcggatgacccgaatccacttgtcgccgggggcggtatcaaaatccttaaagagcatgggatagaggttgtcacgcaggtgcttaaagacgagtgcgacaggctgaacgatgtattcttttactttatacagaccagacgtccatacgtcgctatgaaatatgccatgacgatggacggaaagatagccacatattcagggctttcaaagtggataacaggagaaaaagcgagagaacatgtgcaaaacctgcgccacagatataaagccataatggcaggaataggaacagtgcttgcagacgatccgctgcttacatgcagaatcgagggcggagtaaatccaatccgcataatatgcgatacgcaccttaagcttccactggaatcgcagatagtaaatactgcaaaggaagtgccgacgattgttgcagtcagtgagcgatatcgtgaaaacgcacagtcagaagccttacctgatactgaaaaagatagtatagaagaaaacaataattatcaaaaaaacagaaaaataacacggcttgaagaaaacagaatagaaattctgtatgtagctgaaaaaaacggtcatattgatttaaatgacctcatgcaaaagctcggcgaaagaagcatagacagcattctgcttgagggaggcggaatactcaactggtcagcccttaagagcgggattgtgaataaggtatacgcttacattgcaccaaagcttttcggcggagcgaatgcaaaaacaccgatagagggcatgggagccgactcgccggcacatgccgtgatgcttggaaacagtaaggtaacaaagtttggtgatgatttcctcatcgagagtgatgttgtgtaattgatataattgttactgtttcgccttggtgagaccggaaacaatttgccatgtaaattatgcaaatgagtgtgaggaaaatatagaaaaagaaaggcgatacacaatgttcacaggaatagttgaagaagttggaacaatagatacaatttcacgtggagcaaactcagcagtacttacaatcagagctgaaaaagtgctagctggaacaaaggtcggagacagcatagcggtaaacggtatctgcctcacggtcacaaggctcatgccacatgcgtttacagcggatgtcatgcacgagacgctaaaccgttcatcgcttgcaaatgcgatgagaggagcacatgtcaatttggagcgtgcgatggcggcagatggcagatttggcgggcacatagtgtcgggacatgttgacggaacaggcaggattgtggaggtcaaaaaggatgacaatgccatctggtatacaatacaggccacaccacagctcatgcgctatatagtcgagaagggctccgtaacaatcgatggaataagcctcacagtcgcaaaggtggcacaggataatttctcgatatcagcgataccgcacacggtaagccagactgttctaaaggacagaaaagtgggagctgtcgtaaatctggaaacagatatcataggaaaatatgttgagaagctgttgtgtaaagggcagccggaaggaataacagaagaaatgacaggagcacagacaattaaggaaaatgcactgcataaatccggcgaaaataaaccggatggaataacaagagatttcctggcaaaatacggattttaacataaaagcacgggtatcgtgcgggtttgcgaatgtgtgtgtggctgaatggttaaaaattatgtaattgaacagcttaaaaatcataagagaaaggacataaaatatgaaattcaacacagtagaagaagcacttgatgagcttcgtgcagggaaaataatacttgtaacagatgatgaggacagagagaatgagggcgatttcatctgtgcggcagaatttgccacaacagaaaatatcaactttatggcgatgcacggcaaggggctgatatgcatgccgatgtcgcaggaatatgtaaagaagcttcgttttccgcagatggtgcaggaaaatacagacaatcatgagacagcatttacagtatcaatagaccatgtctcaacaaccacaggcatttccgcagcagagcgctcaatcacagcaatgaaatgtgtctctgatgacgcaaagcctgaggatttcagacgtccgggccacatgtttccgcttctagcaaagaaaaacggcgtactggagagaaacggacacacagaggcaacagtcgatctgtgcaggcttgcaggactaaaggaatgtggactgtgctgtgagataatgcgtgaggacggtaccatgatgcgcacaacagagctcatggagcttgcaaaaaaatggaacatcaagttcatcacaatagcggcacttcaggaatacagaaagatacatgaaaagctcgttgaccgtgtcacagaggtaaagctgccgaccaaatacggcgaattcaaggcatatggcttcgtcaacagattaaacggagagcatcatgtggcacttgtaaagggcgaaatcgcagatggaagtgatgtgctctgccgagtacattcagagtgtctcacaggagatgtattcggctcacagcgctgcgactgtggccagcagcttgaggcggccatgagacagatagacgaggagggcagaggaatactgctctacatgcgtcaggagggcagaggcatcggcctgataaataagctgaaggcatatgagcttcaggagcagggaatggacacactcgaagcaaatctggcactcggctttgccggagatgagcgcgagtactatatcggagcccagatattaagagagcttggcgtacacagcctgcgccttctcacaaataaccctgacaaggtataccagctctcagaatttggtatggaaatcagcgagcgagtgccaattcagatgagcgccacagcgcatgacctgttttatctgaaaacaaagcagaaacgcatgggacacatactctcatattagtacaccgcatcgagcgtttttgcaatgtgtgcggggattctgaatagtaacaaattctaaatagttaataattgcaaagaaactcatctgagtaaaaataaaaacaaaaggagaacgaaaaatgaacgtaatcgaaggaaaaatgacacaggatggaatcaaggtaggaatcgtagtagcaagattcaatgaatttatcacatcaaagctcttagggggagcaaaggacggactcgtaagacacgacgtaccggaggaaaacatagacgtagcatgggtgccgggagcattcgagataccactcatcgcaaagaagatggcaaaaagtggaaaatatgatgcaattatctgcctcggagcagtaatcagaggtgcaacaagccactatgactatgtgtgcaacgaagtgtcaaagggaatcgcatcggtatcactcgagtcagaaatcccggtaatgtttggagtggttaccaccgaaaacatcgagcaggcaatagaaagagccggaacaaaagccggaaacaaaggatatgactgtgcgctcggtgcaatcgaaatgataaatctcgtcagacaaatcggataatataattatatgattaaagggtcaaaaggtatcatcgatgcatgcttgcatgtaattcgttgtataccttttgaccctcatatcattatatagaataatagcataatcccccgaggttcaaatatctttgatatttggacctcgaatacttattatatctcaaattgtaaattactgtcacaacgtaagtggcgtaagcgccgggcatccggcagcgcacacgcactcccacgcctgcgaatagcgaagctgcatagagactgtagaattatgcccaagaaaaacagaaatgcccggccatggacggccgggcaaggcgttatgcgccacggacggcgcataaaagccggtttcgtcaagcatagaaccaccccaaggcataattcgtacagctctcttagcagcgtagcgtagcaggcgcgggagtgcgtgtgcgctgcacggatgcctggcgcttacgccacgccctccccacacaaaaaagaagaaaaatttaatatctaaagaattgcacgaaaaatctgtatatagtataatgatagttcaggaaaacaaaacggaggaccatgaattttgatagatatacattgccatttattatacggagtggacgacggctcaaagtcgctcgaggaatcggtagagatgctcaagatagccaaaaagcagggcatcacaggcataatcctcacaccgcacctgcgccatggaatgtttaagcatccgctcgaaaagatagagcgacactataaaaagctgatgccatatgcaaataagcttggaatagaattaaagctcggcacagagtatcatgtggcaaccgatatgatagatgcctttcatggtgggctgtgtcatacactggcagatacacagtatatactcacagagtattcacattccagcgaatactcgtttgtatacaagatgacgcgcgaagctatatttgcaggatatataccggtgatagcacatgtagagagatatgagtgtctcagtgatataagccgtatagaggatttgcaggagctgggagcgctcatacaggtcaatgctgactcagtgcttggcatagatggcagacacttcaagagatatacaaagaagcttttgaaggcaggacttgttgatgtaatagcaagcgacagccatggcacaaaggagcgcgtctgcaacatgaaaaaatgctatgagtacgtggcaaagaagttcggtgatgactacgcgcaggaaatcatgcagaccacaccggaaaatataataaacggaagataatcagtgtaaatgcggggatacgtaatggagagagaacaggattttgacaacgagatagagatagacttaaaggatctgtttcttgagataatttcatattggcagtggataattcttgttacgatagcaacaggtgcagtggcatttgcgataagcagatttatgattacacctatgtatgaatctacatctgagctctatgtactttcaaagagcacatccatcacaagccttgcggatatccagacaggcaccagcctgacaaatgattacatagttgtagtaaagggacgtccggtgctggatcaggtcatagaaaatctgaatctgaatgagagctacaagacacttggcggaagggtgacgcttgataatccgtccaactcgcgagtactcaatatcacagtaacggatcccgatccgcagatggcaaagaccatagcagatgagatagcaaaggtcgcatcagcatatatagcggagaagatgaagcaggatccgccgaccatcatccagagcggatatgatgatggaggcgcggtaagccctaatatcggcaaaaacacagtgataggagcctttgcgggagcatttctgtcgattgcggttatagtggtttcttatctgttcaatgatacaatcatagatacagaggatgtggagaagaagctcggcatgaatgtgcttggtacacttccgcttgatgaatcggaagatgacggagagcaaggaaagggcagaaagcatggcagaggcagccacagaaagaaaagaaaaaagaaatcggcttcagcataaggaagcctgtatcaggagatgggcagatggaattagtaaaatttggcaagctaaaagaacaaagctatacgatgaaggaatcacttcgagctttgaagacaaatatacagttttgcggggatgatatacgcacgcttcttgtgacaagctctgtaccaaatgaaggcaaaagcaccgtggcacttgatctggcgcggtcgcttacagagtcaggaaatagagtgcttttcatagatactgatatgcgtaaatcagtccttgcagggcgtctgcgtgccacagtggcaagtggaggggagatatgcggattgtcgcactatctttccggtcagagacgtcttgaggaagtgatgtatggcacggaaataccgggcctttttatgatatttgcagggccgtctgtgccgaatccgacagagattctcgagaaaaaatactttcaggagcttcttaatttcggtaaggagcactttaactacataattatagactgtgcaccgataggagctgccatagatgcggcagttgtagcaaagtattgtgacggagctataatagtgataggacagggcatggcgagcgccaggatgattcagagtgtgaaaaaacagctcgaggcatcgggagtgaggatactgggggctgtgctcaacaaggtaaacaacaagaaaaacagccatgtcagtgggtactatggcaattactacggcagctattacgggcagtcggataaagcatgaaaagcatcgatgtagagttaggaaaatcaaatatgcttccgcttattgcaagccagcagttttatgcttcgtggaaggtctttatcagggagcttttgctcaatgccatggatgcctgcaatgtgcggcaggcacttgagtggagctggggcacggagttccttgagatggagcaggcaagccagatgcgcgatgtcagggccatatatgagccacgcatagacatcacgtacagcagtgatacaagactgtttacgatagaggataatggagtaggcataaatgaatatgacctggagcactttatcgcacagataggggcaagctattatacaagcacagatttcttcaatcagcagctgaagtatgagccgtattctcactatggcatcgggctatgctcgtgctttacagtctcaaaggctgtgctcatcgagtcgaaaaaggataaggtaataaacactgcctggaacataagcaatccgcaggataccgcaccggtcatggcaaagtggtttggagagagcggccagatagagtatgtcatatcgcagaaaaagacaccgggcacacgcatctctatccccgtaaaaccatcatatgcgccgtatatagatctggactttatagtagaaaccataaagcactatatgcttacactgccgatacctgtaaatatcaggtgtgatacgagggaggtatgcctgtcacagccaaaggcaaagtggaactatccgatgaatgagcttgttggcatgaatatcatacgagtggataacagcctgcttgagggctatgttgccatatatcatccaaagcacaaggggtattttcataagtccacgctgtaccagcagggagtccttgtgtcagatgctacagacatactggggcttgcaccatcatggatagacaatttctcgtatcagctcaatatcaaaaagaggtttttaaatataagcatatcaagagacggagcagccttcgatgaaaagctcatagagctccgccagtatataggacagattatcatagatacctttgggcagagcccgcttacacttggccagtatctgtcagatggcagaaaacggctggtatgtgaatacgaggcggaaaacgagctggtaagcagagctgtacaggtgcttgtatatataaaggagcgcgaggtagaggttccggtgaggacagtaataaacggctttatcgggcggaaaataaagatagctttcatgcagaaagcactttttgcacactatagggagaactacccttatgattatggtcagtttattgacaagtacgatatcatagtatttgagcagaatatcagagccttctggcagtttatgacaccgtatatcacatcgatggagtatgttatgggtgacatgccgggcatcatatacacggatgtatcggcagatctaaccgtggcaaagacagcagcatcgtacagaaacgactatgtgctaagaccggagtattatgatctggaccctgtattttgtctggtgtcaaatgagctgacagacccgatggagctggtgataaatacccacaaccgcaatgcaatgcttttgcagcgcgccgaaaagtacaaaaaggtaaggattgcaagagctgtgatcatagaaaatatcaagcagaggatactgggcaatgcatccagatggaacagtatcatagattttggaggcgagctcgtgcaccaatatgagctggaaaagccaatgagcctgcaggcacagtggtgcctcgagagagacttcccggatgaaatcaatgcgtatatagcaaagacctttacagacagggaaatcgcagattacgggcttacaagtctttattttacaaggaaggactttataaagtggtggatggcaccataggctgtaccgccatgacatatattatcaaacacttattgaagcatgaataaggagaacatgaaaatggagatattagacttaaacaacgaagaagacacaaaaacaaccgatgagatggagcaaaaaaagccggaggaaaaaacatcacctgtcaaggaaatcttaagctgggtgttaacaatcgcattcgccattgtagcggcaatactcataaagaactatgtcattataaatgcaaacattccgtcaggctcgatggagaacaccatacagattggagatgacatatttggcttcaggctcgcatatacattttcagacccaaagagaggggatatagtcatattcaatgcaccggattcgccttctgagaaatacatcaagcgtgtaatagggctgccgggagagacagtcaccatagaggacggtcaggtgtatatagacggtgaggcgcttgaggaggattatctcaagtcaaaccagagcggtgaggatccgtggacagtaaatgccggaccttacgagtttaaggtgccacaggactcatatctgctgcttggtgacaacagaaatggctcatcagacgcaagagtctgggagcacacatatgtgtctaagaacgatatacttgcaaaagcgatattcagatattacccgttcgacagattcggagcggtgaaataagctgtaaatcaggatataaaataaaaatagaggtaaagtaaatgccagagatagaaacagacattgaaaaacgaaataaatatggcatgctgtgcggtatagtcggtatatttttaaacctcatactatttgccggcaagctctttgcaggaatgcttagcggtgcaatctcaatcactgcggatgcattcaacaacctgtcagatgcaggctcatcaatcatcacgatagcaggcttcaagatggcggcacagagagccgacgaggagcatccatacggacatgcgaggatggagtatgtggctacactggcagttgcagcaatcatactcatcatgggctttgagctgttcagggattcctttggcaaaatcataaagccgcaggacatagagttttcatggcttattgtagcgatactactggcatcaatagcagtaaaatgcgtcatggcggtatacaatttctatttttcaaaaaagcttgattcatcaacactcgaagcgacaggcagggacagtctgtcagactgtatcgctacatctgtagtacttgcagccacactcatagcgcacttttcaggactcaatctggatggaataggcggtgtatttgtgtcattgtttatattctattcaggaatatcatccgccagagaggcaatagacccgctgcttggagcaaagccggagccggagtttgtcgatagacttaaggagatggtactggactttgacaaaaacatactcggtatgcatgaccttatggtgcatgattatggaccgggacacaggatagtatcgtttcatgcagaggtgccggaggacggagatatggtcgagctgcacgatataatcgataatctggagcgcaggatacgaagggagctgggctgtatagtgaccatccacatggacccggtagcgatagaggacgaggaggtagccggactgaaggccgaggtgctctccgtgataaaagggcttgattcgcacataaatatgcacgatttccgtattatcagaggtgatacacatacgaatctggtttttgacattgcagttccattcggctatatcacctcagatgatgatatatgcaatgcaatacaggaaaatgtcaggaaaaagcttggaaagaattactataccgtgatagaggtagaccgcgacaattacataaatatatgacattgtaatagatatatatacgagcttcgccggtggctgttgggataaagaaacggtgcacaataagataaaagagggtaaacattatataattttgtatttagttaccatcagttcattgatattagtaggatcaattcagatttttcagaattggaagagtatgaagatttgcaaatttatggagtgtttgcagtaatggcttgctgtacatttgttgtagtaacacttatgcagattgttgttttaagccaaaatgcatatataaaaaagttaaatgacatgtatagcgatgggaaggattgctgattcgaagtagttatttaccaagatatttttacttcagcatttttattataagccggggcgtttttgacccggcttataatttttaaaatactgaattagtttggatcatgctggaaattgacattttctaattctttatcaatctcgttcatgtcgatagattcttcaatttcgcgaagctcctcttcggttaaattgctttttaacatataattcacctcccttgtattatatgatagcggcgtttatagaccagttcctaagtttatatattatactttggagctattgctgattaatttcatcttttgccacttgatatttataaaaatcaacaacaacctccaaccataattattgaataattaaatatttcacagcaattaattggaatgcaagtagaagtataaatgttagccgtttcaaaacaacaactaatagtatttttttgaaacttaaataaaaaatcttttcagtctttattatgcagaataaacatgatgtcttgaaattttctcaaagtaattttatgaaattagtatacagcagttccgaaataaaatcaatatattttatataaaaaacttactaaatttctgattatcttttcataagttggtaaatgccgatatatcccgtattttagggatttatcggtattttctttttggaagataccttgcataagctggtatttaccagcatgaaaatgcaaccaaaagtagtaaatgagtagtaaatatacgctccgatattaacaagccagtctttccagttctgcttttgcagattgaaatgtaccgtgtgcataatagccaagtgtcatggttatgttagcgtgtcccatgagatattgcagagtgttagggttcattcctctgtttgccatattcgtacaataagtatgtcggaatgaatgtggtgtgatgttcggtaacttgtccgtgtgatatttgttatacttcttaatcagccctcgtaccatgccctcatagtttcctgcaactttaggtaagccctcacggtttaagaataggaaattgctgtaaccacctacaatcagcggttgtgcctttcctctgttctttagtattctttggattgcttgataagcccgttctgtcaatggaagttcccgttttccgtttttggtctttggcgtttcaatatagtagccgatttcgttgtctttcaatagctggtggtctatattgagtattctgttctgcatatcaatatgcgtcgtcagtccgcaaaattcagaaatacgaagtcccgtttctagcagaagcacaacctcatcataatacttgctgtaaatcttgtccttttccataaaggcaagcaggcgttcttcctgctctggtgtaaggataactttctgttctgtatcatcttccagaacatcacttagcttaaattcaaacgggttctttctgatacagtcgtcttgtatcgccatgtaaaatgacgctttcaaggaacgcttatagttatcaatggttttataggcatatcctttttcactcattctgatagcccattctttcgcgtccgactgcttaacagtatcaatcgccctcatacccaatgggtcatttttcagagcgttcataagatactgtcgtcctttttcagtagcccttttgatgttctttctttggctgttcttcttgtcgtagagctggcagactgtcattttaccgcctgctatgtcgataccgtcgttaaggtcttttttaatttgtgcttctttttccctcaatgaaatatcatcacgttttccagcaggtgtcttgtctgtcggtacaagtttccaagaatagataaattgtggctttccgtatatatcggtatatttataaacgtatcttccgtcttttcgctggctctctccattacgcaaattgcgatttttactgtcttttcgtttcacattagacatagtgtaaagctcctttccgtcatggaatgagccgtgatacgctatatcttattataccatattcacggctcaatgacattagatttcgtccaatgtatctatgattttttcaaattgttttcgcttaatctgaatacggttaccgttcacgataacccagccagcgtcaatattttcttcggctaatttacgcaatttcttttcgccaatgcggaagtatttggacgcttcttcaatcgtcagcgtatatttttcccagataggcacatcagtattgttcataatctatgcaccccctttactgtgtgtcattttttacaagcaggcagacggctttggaaagctccattagtatctcaactattcccattcttgtgggcagaaccgcaccatgcggacgtatcattatcctgtgaggataggtcgtggcaaaacgacttttccaacagtcgctctcggatcactgcgtgggtcgctcgctttctttttgaaaaggtcgtggcgtacagtccccgtggctcgctatctcacaaacgtatctgtctgctttattcagttgtcaaagagctgtggcgaaagcgtgttgctttcatgtaaaagcaggggcagagcaggaaagaggggagtaaacaaatcatgctctgcgattactgcttgttattcttcggtttctaaaggaatatcaaagtccaaaatcattttgataagtgcttctctgatacgtccttttaattccatgtctacgactatgcagacattaccatatctgtcgtagaacggacgcaaacaacattttgatatgtacgggtcataaaatgccagtatcttttcaatcgaatttacgttgccgtccacagccgacgagataaggtaaaatgacgggcgtgtgttattcatcattcatgttctcctttaattttttattgatttcttcaagtgagttcttcctactgcggaacgacgttgaacggttaatctttaatctgtcgccgatttctgtatcgctcatacctaagaagaaatacatcaacaagatttctctatctttttcagacagatacttaattgcttctgctaaatcatcatcaaggacacgaacctcaataccacatacatcaaaggcggtataatcgctttcgtattcgtcccagactgccagcttttctacgacgatttctggaagttcacaataggagatttccttatttcttcgtcgctttaattctttgcgataattacggacaatgcctttcactacacgtttgagcttgcagtcaaattgacattgtattgtcttttggaagtccgacggtttcatatcatcacaccccctttccgttatgacgtgaaaagtgtttatccctctttccgcaccatatctgtacagcaaggtgtgatttgttgcatgaatttgaaaaaaagtgaaaaaaattttttggatacaaaaaaagcccgcacaaaacatatagtctgtacgagctattaaagctgtaagatattcagttgttaataaaatgctgttaggtagtagatgaccgtataagattatgcttaaaactttccatgacccaagcccccttacagcacttgatttttattacacctttgtttttttcgtaatcttgtaaatatattcttctggtgtagggcgtttatttccaaaatactttttgaaatttgcatgcacctctgggtcggtgctattcatagcttcatcaatcgttgcttcaatattttcccgtacatcagctaatgacataccgccagcctttgcacctgcctttaatgcttttttaatatctcgtttttttaaccctatcattcgaaccaactccctaaaatgagttaatcttctttttcaaaaattaaatcaatctttcgcatacaaccttttgcgtcaatttctgtaggtataaaaccaacatagcgatacccattttctgcatagctatttataactttcttatgtttatcggtgcaaaggaacacaacacctttcgcagtataatcaatttctaaatattcatattttttcatttttcctcatttcctttctctttcatattttctctacgctttttgattgccttatttcttaaaggaataccaacacccaatatcaatcctactaccaaaatagtcaagtccataagcacacctctcttttctaaaactcttttttctttagtattgttaagctaataagataggagatacctaaaataacaactgaaaacaataaaaataatattatatatactagtggctcaaatttaggtaatttatttattaagtcatataaatctattcctaaatattcagtagtttttataagaagcagtcctataacaaatataagtcccattacacctatgatagcaattcttcctttttctccaccaaatttcaagataagaggaagcatgattgataaaatcaataaaatagtaggaaataaagaacctgctgttaaaaaaatttcattaaaactgcctgtttttgtaataccaatagcaactaaactaataacagttcccaacaacaaaaacattattcctgaaatcaatccaaaaatatatttttccagtacataatcttttcgtgttatcggtaaagaaaataaaaaggcatttccattatcaaattcatcatagctaattgaactcaatgagaataatgcccccacaaaacctaagagaccaatcggaaacgaagtccccggagatactattatcattattatagatatagcagtaatagccataaagaagtttttctgtcctttcagcaatttaaaatctttaatcaataaacctttcattattcaacacctctaatcatcattgttattacttcgtctatatttcctttttcaatcgccatttgaggataattttcagcataatattgtttttgattagttaaacaactatatccatagctttcttttttggtacgtaaaatatattgtctatctaatttggaatattcttcttcatcaactttaagtagtgcataatcgcttagtaaaacatcagtatcttcgtgcataattacttttccttgatgtatcatataaaggtcatcacataaagtttctaaatcactggaaatgtgagaactaattaaaatagagcgttcttcgtctttttctataaaatctcttagcatttctaacaattcatctctagctattacatctaatcccgccgttggttcatcaagaattaacaactttgcattgtgtgaaacagcaactaagacttttactttcgctttcataccagttgaaaaatcttttattcttttatttcgtggaagctgaaactttttaacttgttctataaaaaatgatttatcaaaattttgatataaattatcaataataggaataatatcattgattgttaaatatccactaaagccagagtccgaaagaactactcccaaatcttgcttgtcttttgcagtaaaatcttgtaatgactttccaagaatattgatagttccactatcaaaggaaattagccctaaaatagctttaaatgttgtgctttttcctgcaccattttgaccaatcaaaccagttacatgacctttctttacttcaagagaacaatcaagcgaaaagctttcataactttttttcaaatgctcaatttttaacatatctaaccctccaaaattaactcaaatagtttttttatatcttcatcactgataccgtaacatctgcctttttgaataattcgttctaaatcactttctaattcctttttctgttcctctaataaaagctctgtatttgtagcagtaacatatgttccttttccatgaattgttaccgtaaacccctcgttttccaagttatcatatgctttttttacagttagagcacttatttttaattcttttgcaagagaacgaacagacggaagattatcattttcttttaattttccattccgaattaaagctttaacttgttctactatttgctcgtaaataggtatcattgaagaatggtttataataattttcatctcacagctcctttctgtataaacagtatataacagagcaatgctgttgtcaagtgttatatggtgtttgcgcagaaaatgaagcgtgcaaatctcatttaagaaatgcacgctgtatcatttatcctacaatcttccagttgctatccttatgtagcacaagctcatactgcgacatctgtgtagcctttgtctgattatcaaggaatttcacggcaaccttgactttcacattgtccccgtcttttgtaaagatagggtttaccaattcagaataaagatagtccctgccgataggttcaatcacatttccagctacatagtaagcaagctctttttctgtggctgttggatagagcttaaagaatgtttccagaaatgcggtagcgtcattgacagtatcagcgtctacacttgcgtctgcttctggtgtcttaggttcgtagtctgatttttcgattgctggtgcaagggtagggttctgaacgattaccatatccccgtcagcgtccacatagacttttacagtataggttgcttttacattgcttgtctgttctccctcttttatctgctgatctacttcgtaggtagcagaaaaagtgtccgttcccgactgttcaatactccatacaatcacatttgtaactgtggagctggtcggtatatccgttctgattgtatcaacattcaagtcctgcaattcctttgtcagataaccgttgattgcctgcgtccttgcttcaatcgcttctttgctgttattccatgtgtaataggacttcgcaaaattcttcacgaaattttctatcccgttggtatcctgcaagcgaagctcaatgatttctttttcgtgagtcgtgtgctggtcgatagcggtaaaattcttatacaccccaaagctcacgcttgcgataagcaccacccacaacgcaatcacggttttcttatgtgtgcctaccttgacagtacgcacctttttttcttttggttctttgatagtttctgtctgtttcttattcttcttaaacatatttttcaagtcctttctattgttttactcgtcctgcaccgattaagtgctgttgccaataactactatttaagtctgcatatcctatcggattgcctgcatggtacatctggttatttcccacatagataccgacgtgggttacatacgaaccagcgttataggtagaatggaaaaagaccaagtccccagcttttgcctgcgaaagtggcaaatgttgggttgcgtcatactgggcttgtgccgttctcggtaaggagatacccgcttttccatagcaccattgcgtcagtcccgaacagtcaaaggaagtgttgggattgctaccgccatacacatatttccagccttgatatttcaatgcttcattcattaccttttgtgccagttctcccgacacctgcggaacagttaaatactgattgactaattccacatagaacatatttccatagccataccgccagccaccatttttcacaacggctatcgggttggtataggttactttctttccacccgatttttcacgagcaaagctctctgcaaggttaaaggtgtgtttctttccttttcctgccacatatcccacatagccaccgccatagttataggactgtattgctacattcaagtcgtcgataccttgatttttgcaggaagaaagcagggacgcaaaatacttacacccctgcttgattgagctttccgtatctaaggaattaggcggtaaaccaagactttccgaactctgcataacatcttctgccgtaccgccactttctacttgaatgatagccaatagcacattgacatactcggaaataccgtactctctggcgtacttttccaccataggctgatgtttcaagacttctgcggataggttcatacccgtaatcccagaagaaaaattgctgttctcgtcgtcgctgtccgcactaatgaggacaccaaagaaaagcaccagagaaaagaggataggaaacagactgccaatgagagcgatatgtttcagtttcattttttcttctgtcctttcttcgttacaaggttacgggggttctctgtggtctgctggttcttctggacgctctgggtctgctgaacttttgtcctgcggtctttggtgtaattctggcgtgtttcctgcgataccactttttctacattctgcctatgtactgtctgtgtaggctgggtcgcttttctatcagaaacaccagaagatagcggacgctctttgataacacttgtcttgactggctcacttatctttgaagtggtcgctgtggcagggcgtttgacttcctgcattttttccacactcggctttggaatggttgaagctgtggctggtcgctcatggggacgggtagctcccgttgtcgctgatccgtcagcctttcgctgtgcctgccttgcttcttgtgctttttgaagctccatacgcttgtcagcaatattctgcctgcgttgctcctgcttttccaagcgtcccgtctgtctggactgctgttcctgcaccatgccacgcttgaagtcggacacgctggactttgctttttcctttgcggaatacaccgcataagcggtctgtgtcggcatatccttgatattctctttgactgcgtttgccttgtctttcactttatttttcgtatctaagacagcacccacctttgagcctgcacgctgtcccatgctggaagtggtattgccccgattttctttagaagctgtattttttctttccgctcgtttgccagcaacggcacttccagctaccgcaccagcgacaccgcccgaaataccgccagcacttaccgcccttgcaatacggtgttccatacgcctagctctatgtcgcataaacagatacggtcttcgaaaaattcttcgtcccatgctttgactgtcattagcgttcaaagagaacatactcattaagtcgcccagcttcatatagataccagcgaaacatactatctgcaagaacgccaccatgaaaaacgggtaatctgtggaaatgttataaaacatactggaaatgctgaacgctaccgttacaatgagcgttattcctgcccgtgtcattatggtattaaacaccctcacaattgcctgctttgccatgctttcatagctgggtatcatggaaagtagaaagctgataggtaaaaacattgcaaaaataataaaaagtatctggctaaacaacatcatgcccgtaagcaagaatacaaatatcgttatccccaagttgaagaacaagaggaagaacaccatacctaaacggtttaccacctgcggtatcgtcagattattattgtcgttatcctcgatttctgttttcacgacttcctctctggtcttgccgtcctcgtcctctgggcttgccgatacgagagcttccacacggtctgtcccgatttcctctgcgttgctgttcccgaattgtaagagtaaccacggctgttccacttgaatggaaaataagctgtcccgtatcaagtccacgctgtccttgccctcgctgtcagagttggggagcatgatttttgttcccaagtcaagtgaagcggtactgatgtctgatgaaaactcatttatctttttgatgtaatcgggagcataggcaataaatgaagcagacaacacgaataccaccacaaagttgataacggcgtgaagtgccttgctggtttctctttttatcagtcccgtataggcaacataaagtcccaccactaagataatgagaagcagaaaaccgatatagaagcccgtagaagaaaagccgttctgtgttacacctgcaagggtctgtatgctttttccgatactgtctgccatatcgttaataaaatcaagtttgtaggcttcctgcaccacatagcccgtagcattgcttaaataaaggcttatcgtccagacaaagttggtaatgcagtaaagcccgtattgcaccgattttccgataccgtccagccagttccacggaagccacgaccagctattatccacataaaaatcaagctggtagttggaaaggggatattttgagtaaagattttctgcgtttatggtatcgtccacaagccccgtcgcatgagccaccgtccccagaagtgaaagcaggataagggagagtaccaccacgaacagagccattttgagaaagtggaaaatcttcttttttgtgaacgcaccttttatcctttctttcatcactccacctcatttctctgtacgggcggtctggtatcaaaggcgtgtagcagttcttcaaagactgggtgtatctgcaccacaccgacacgcccgtataagtcctgcaataagcattgtccgttctccaaatcacgaagtcgcttctggttgttttcgtcgtccttgtcgataccgaaaaattctaaggtctgttttatctcgttaatatcagtagaacgaaaggcaaatttcaagccgatattgtttttcagactttcctttgacacgtccccagaagattgtgtaacgaaataaacgcctgcctgcatagctcgtccagcacgaaccagcttatttgataaagtttctccttgtgccacattcaaaaacgcccatgcttcgtccaaatctacaatcttaaaaatacttctgtccgaatggataaaatcaagggcaaaggtactaatcacaatcagcatagacaccgacaataattcaatggtcgtgtattcctcaaaagtggtatctttatctggcaacacaaggtcggctacttgaatgatattgagctgattatctaaactgattgcattttccaccgtaccgtctgaaaacagcaggtgtgcaaagtcgtagtccgtgaagctgtcgatatggtctgcgatatttcttgatatgggtgtatcttcacggcgtagctcgtctatcacatggagcaagccccgactgtcactctgggtaacggaacgtaccgctttacgaagtacgggaaatttttcgccgtccctagaggaaatacccgtaaggaatgtcaagatgtcgattgccagactttcagcgtccttaacattcttcataatcacgaatgggtcaagaagtcctgcattgtccttgtcgctggtaagatttacgatattgatttcatgggcgatttctggaagtgtttctttccagttgcctctctcggctttggggtctaaaatgactgcttgaccgccaaacagcaccgcataatataccagaagattgttacagaacgattttccaccgccaagcgaaccgacaaaagcagaagctaaagcgttggtaactgtgcctttcacaccttgactggcaagggacggttgcaggtacacatttcttcccgtatcaacggaatagcccatatagatacccgtagtttcccctaactgctgggtcgcaccaaagccaagccctgccaagaagtctgattttacatactgcacatagtcattgatatatcgcttgctggcaggtaaaaattcagaatgaagccccagcatatccccagcaggacgcaccagctttacattgaggtcgtcgtaaaagtccttgacttcatcacaacggcgtttcagctcgtcaagatcgggtgcagacacccgtatcacgtagcttaacttatacatactttctttgctctggtctaagtccgtttccagctcgtccacgctgtctaatgcgtccaccacatttgagctggtttcacttcctgcttgataggcgtgattgtccaaatctttcaattcctttttcttgttgcggacggttgttaatgcttttcgattttccacgatttctacattcatagaagtatcaacggggaatgtgaattgctgttgctgaaaatagaagatttcactggacggaaaatcaagctcgcctacaatcgcattgacggtaaaataggacacatagctttccttgtcctcatgctccagccttaaataccgctggctttcttcaatcacacaccttgtcggacggataaggtcgtagtattttatcagcgtttctttctgtaatttcttctttggtagctggtactcataatcttcatagacaataccgtccctgccgtaaagatgttccgtgagatacccaaaatcattgatttccaagcgacgcaccttaaagcgacgggagattttattttccaataacttttccattttcatgtaacggttgatttcatcattcggcatggaaacaaaatcattcatcagcgtgtggttcacttcatggagaaattccttgaacgtcagccacgccgattttttgatgttcttcagattgagctgttcttccgtaaccatgagcttaaagccaagaaaaaagcggtagtccacttgattgtccccaatcatagatactaacgcttcggtctgttcgtctattttctggtaggcaacttcctttaattttcccgttaccagtttctttgactgctcctgcatacttcgtatggagctttccgtcgcaatctgcaacgcatgaattttaccctcacgggactgtgcgataagctgtcggaaactgtcatgcacgataaatttctgctctgcggatagaaaagaatagttgtacggtatcagctcatagtaggcgaatacctcattgtccttgttccagacaaggttattgtcaatatattttatcgggaacatagttcacactccttactgccgtgattgtttcattgagtatctgcttatgcagttttacggcttttcctgcataagtgattttaggtcgcagggcataggttatctgtgatttcaaaaagctgtacggcttctttccgtcaaaggttttctgcgacataaaccaagtgagagcaacgggaataccgaagtatttgagaaatgctccctcaatcatggaaagtgggggaatatccccaaacagaatgatgataaattccgtaatcacaaaccatgtaatctgtgtaaaagtaacgggaaagggcaagttaaagtcattgattgcatataagactttttccacgttccagatacccgtataagatttaatctttttcaagttctttcagctcctttcgtaagtttctaaatggaaaaggacagccattttcagactgtcccttaaaagagaaatacgctgtcagtagcaaccatgcttgtcgctgatcttccagcgttagtatggtatctcgcacatacctcggcttgtttcaatgaagcaaccgcccatatccaaatctcgcccgtaagcttcatagtcaatgtagttctgtaagctgggtggaatatccccaagtgcctgcaattcgtctatgtagtagcaggcaacgtctgtcatggtttcacagtcgggataataataaatatcgtccttgtgttccacgacttcttccagtgtcccgtagtggctgataaattcgtccagacactctacgatatagtcgggaagttcctctatcatttcatacatctcattaagttcttcaatggaaacatactcgccaattgcaatgggaaagttatcggtatcatggattgcgtattcctcatactcttcattcaagccgattttttctttcacatcttcctcgtcaatggggaacgtgaaccaagcaccgactaaatagccctcattgtattttccaagattagcaatataaaccgccatatcatcaatcataagcaccacctcatttcctactctggcagttcaaagataccgtgttctgttactaaaaatttcccgtgttcctgcaagtgagaagcgtaggcttcaaagtcaaaatagtattcttgacagtcctcggataaatgtttgaacgtcgggtcgttcatcagcttttgccttgcaacatctatcatgcttttgcagtcgggataaacggtaatcacgttcctgcaaatataaagtgcttctaaattctcaaacaccgtaagtagtgatacatattcttcctgcatatcacttgaaagctggcggtacataaaatctaattcgttgagctggtacacgcttgtatgttcgtggatttcatcagcataaggcaacaccttttcgataattcggtaatccccactttctgcaacgacacctaacttttcttcaaactcggcaacatctatcggcaggtcgaaccagtatgatattgtttcttcgccagttgttcctctcgtttccaccagcacccttgtttcctgcattgttcctcacgtcctttctgttgtttcatcacatcttttaaggtctggtacgacataccaaacacatactttgaaaaatcttctaactgtctttcttcatagttggcagggttcagtcgtttcatttcatgccacaccttacgcttgtaagagggcaggtcggaaatatactcacagccgatttttgcctgcatatccttaaaaatatcgttcatttcatcactccaatctgaaattttggtaagaaaaaagcagtcaatcctaagaccaactgctttgcatataaatataaatttggaaactaaaattttcggaagtttttttgtattttgtgtagccatagtccagcaataccagctataattgccaagaaaaaaactgcggtaggaatagaatgattttttactataatcgcaattaccccagatactaaaataccaatccctacgaataaaacaggttttcctaattcttttgcatatccttttttgttatcagtagtatcaaatactttaccatgaacaaaagagtaatttccctttaataaagaaatactcacgaatataaggatagcagaaacaaaccacatcattatactaaatcctaacataaaatatcacttcctaaagttgtatttttatatccatattatatcacccaattaacaacatcacaataaaaatttatgcaccgataatcttgttgaacagctctaacagtacatctttcacaccgccagcattgaacaccaagccaacagcaatcaaggcaactaccaagaaaccgataagtttggaaaactcacgtttgaaccctaagtagataccgataaccacaatcgccataagcactaagctctgtgcgtttgataaaaaccattgatacaaattttgtccgaaattcatttaattgtcctcgctttcttctaattgtttcatttcatagtcagcttctttgccgacattcaaaatacacatcaagaccacaccgatacccattcccatagataccagcaggaagtcttttaataatacccacattttttatcactcctaactttccaccaaatcttttgcaggggtcgtctgctgtttgattatcatttcatgcttttctgtgagttttgcctgctgttcgattgtttccatgtagtctgtaccgtttcccttatcaatctttttcagcattttcaaggttggtgctacctgcctttgtacccaacgcaatgtacggtctaaggtataaggctctggctttgtcgtcagcttcaagctctgtctgttatcgccgataaaccaagcccagcggtcattgagtttccagtcatttttccgcttgtctggttcttcatcaacaaaccgcacatactggttgatgatagaaaaggcggtctgctctgcgtcataataggtcagcaaatcccgtactgcataataggcacgttcattgcgaagccgtatctcaaaacggttgataatgtcggcttcttcaagcggtgtccctaacttgacgtactgctcatagtccttttcatagatacaaaaatacacatctgatttcagcgaaccaagataaagggtacgtcccatatattctctgtcgtcctctctgtgcttgataagctcgcccgactgataaaacttatagcttctggactttccgatatattcccgtttcctgcatttttccgcaagctctggaatatccaaaatgcccgtatggtcgttgatagcaaggtcgatacgtttcatcacgcccccgtctatgagtgcgtccatgaggaagtcataccagcttctttgctgtgccagcaggtaactttcaaactgcctgcaaccacgcccctttaactctaaaaggacacctttttcttcgtcagccgaagtataaataaagatgtcccctaaagagtaatgctccgtatagctgtaacgcccgtaatcttcatggagcatataattgatattcagttttaatatatctttgatgatgtgctgtatatccaatgtgggaaaacgaattttcacataatcaaacagcatggtaagcggtgcttctggattgaaccttgccagttccttatgcagagtattaagaagttcctttgacggcttcatttttctactttctatcttgttgagatattcccttgtgataccagaagccaccgccagctttccttgtgagataccgtaagcaatccgtttctcccgtaattcttttatccattgttcttcattcagaaccatacccccaatctgtcaagtgtgaagttttttaaggcgacttcacagccgatttttgctagaaaatcatgccagaagccttatgtttcctatgttttttgtctattgtctatttgcaaacgtacccctctgttagataccgaggggtttaatcagcggacgggacaagccccgtccgccaagaacggaacttgcggttgagaaccgcaaaacccgtccttgtcgtccgtgtctgtgtcctgctgtgaaccttgtatgccctcatagagaaccgcaaaatctattctttcatctgaaagtgcttctttcatttcatcagacagtcctttaagaaatacattacattgcagacaagacttatctaaaactcgaaatcgaaaataaattatcctgctttcaatgcaatgtctgctttccaacctcattctaaacttatgaggaatgttgattttttcacgaataacatcatcaatgattttatctatccttgaatgaaatcgtaaatttggattgacagaataatttaagaaacaatctaacatatatttcctgcaatccgctgtaaaaatatctgtattcaagcacaaacagaggtaatttttctctgtgggtgcgtgataaatatttaatgtgtccttattcaatcacatcttcctttccttgttgttctggcatagcttgtctttcttgtgcaagtctgccgatagtttgtaaaaaatcatgtcctttcgggactaaaggcgtgtaaaattcactgatgacgcttgttcccacatcacagtagccacgccccttgatacgcttctggaaaaactgctttttcacatcagaaccgaacagcataccgtaacctaattcgctgatacgccccaatcccacacggaaattgaagttatctctgataccgtccgagaaatactttgcgtctggacgctggcaggcaacaataaggaaataacctgcttgtcgccctaacataacgattttctttaactggctaagtaaactcacgctttctttcgtccccagcatttcaaaaaacgccacatattcatcaaagataagaaagcagggtggcagtcccagataggcgtagttttcacccgtcttatagttcgggtgtcgtttcatttcctcgcttcgctgtaccatgccctcataaaaggcattgacgcaatctatcatttcttctttggtatggtagacgtttggcatgaccgttcctaagtccgcaaggtcgctattcttcgggtctaagatgtaaaggacagcgttggtatgcagtaaggcttcaatgagcgtcagcagaaaataggttttaccgccaccagttccaccagcaatcagagcgtgagggagtgcgtcatattcccagacaagatttttcatcagctttaaacagccgttttctgcccgtacttcatcaatggtaatgcggtttgctatcatatcataaagcagggtatattcgatatagccgtcatgcaaagtcttgtcggtcagctcacaatataaaccactttccaacttatcctctaaccgtaaaagctggtcttgatattttcccagcgtgatttcacagcggatatgaagcagtcccttttccatttgataataaatcttcggaaaccagacgattttttcccttgatctgctttgcaggtcagtaaaaaaaccgctgtcttgtacggtatcggcttcataccacttattttccagtatcattcgtgccaacttttgacggtgcaggagcttcttgaaaccgtcgtaacagaagcggtaatacagaaaagcgaccaatgcacaaacaccagtcgctatcagtatggctatgaagttgtaaggggaaagcgtcaagccattctctaacaagctgaaatgctcccaatcggtacgcatgagctgtttcatattcagtagcagaagaaccgccacgaatacaaacagaagcgtccctatggaaaagtggtagacaaggtgcttgtcgctggctctgatacggtgtcctttgttccaaatcttacgcataaatcaatcactcctttctgggtatgaaaaaagcagtcaatctttaagactaactgctctatttgtagtaatattaagttgcaaaattgcaattttattgattgaagcataatcaatactcacttttacccgatattgagtaaactatgaattacccatggttgaactgtaatcataactataaatatataaattgcatataacattatttcgaccatgtcattaacattttcggactgaagccttttcctaaaattgataggtaaaatttttgacaccagataatatatcaaatatcctaagcatgctcctgctgtatttataataaggtcatttatatctgttgccccccagccaaacatctgaacaatttcaatagataaggaaaacagaaagccagttaagataacattctttatatgctgatactttttatacagtaatggtaagaaaaagcccaaaggaacaaataaaacaaggtttagtatggtatctattggtccacttatcataccacaaaatggaattatagaaatttggggacgaaatgatattgtgcttgtataaccaatacctgttacagttaaaattccaaataaataataacaaaaaacaaacacagcgataatatgaaaaatactttgttttcgtcccgatttttttctaataaaaaaatacaatataagaactggaattataaacacatacccacttattgaacgaataagaatatcggaaattggcaacatatttttcactccttttacatgaactcattacatatatttgtcagtccgtttcttctataaagataacagcaaaaattaaaaattatccaacgaaaaatcgaaaatttttcttaaaattttatttattctacatactcatattatagcaattccatgtattcgctacaatgaaaatctatccagcaatcctattttttcggctgtccctgcggtgtatggttctgtggacttcctgcgttctggtttcctttattcttcaacacaatatcctctgcttttacataccagtccacatctgcacccgtataagtttttcgtgataccgtatcggctactggattgacaagctccacaactgcattgtacggaaattctcttaacggtacttctggcggtacagacacggggataattccaccatgcagactgcacttcaaatcatagatacgctttttaagctgggtactcggtgtcccgtcctcattctgtaagaacacatcacgcaccgctgtaaattttaattctccaaatgttttctctttgtcaataacaaacccgtttgataatctcataaattcttcactcctttacttttcttcaactgctacaatatcatcagcaactaatacataatcggtatgtcccatatccccgattgcgtaacctctgccgtataacttcggattgacaatttttactttctgttcatactggaacttcttttcgccagcctgcacgggaatttctaccacaacattttcgcctttctgtacgtcagaataaaggttatagcttcgtctggctaagaccctgcggttatttttatctctttcaaagactggctcactttcgcctgcaaattcaagagttccaaaagactgtgccatatctggcacgacatatttcatttccatattgttttacctcgtttctttctatttttgataaattgattgattgtaatttcttattctggcagttcgggaaataccagcaatcccacagatagtaaagagtaaaatcaatgcttacgcacccttgactatccgtgttcttgctggttgttggcagacaagccagaataagcggaagcctgccgtttgaccgtttcggcggagagcgtgattttcctttcttcataccgttaccgccttatgatttcttcattttacggcgtttgtagaagaagatacctgccagtccagcaccagaagtcaaaagaagtgcaagcagtccgtaaaggtttgtgttatcgcccgttttgggactgtcgctcggtctgctcggcttttctggtgtctgcggtgtttcgggtttctctggttcttctgggacttcggttttttccttaaaggtaatcgtctgtcccttatcctcaatatccttatgctcggtaactttcttcggctcgtctggattgctcaaatcatataattcttcaaaagttacaagctgtttgccgtcaagggaagtagcgtcaaaggtaaaggcaacttccactttcatagtttcgctgtcagcgataaacgtataatcactttccacacgttttccattgataagaagctctgcgttttcttctttcaacatctgccagcccacaagtttgtactgtgtaccgatttctaagccctctaaggttacggtatcaatgattgtaacgtcttttccagcttcaatctctttgttgccgtccttatccgtagcggtagtatgtatcttgatgatacgttctgtgataagtacggtctgcccgtcgtcctcaatgtctttgtgttctgcaactttcacgggttcgtctggattacttaaatcatacaattcttcaaaggtaacaaggttcttgccacctaaagcagacgcattgaatgtataggaaatttccactttcatttcttccttatcagcgacaaaggtataatcattttccacacgtttcccgtcaatgataagctctgtattttcttcctttaacatctgccagcctttgagctgatattttgtgcctttggtaagtccgtccaatttgacagtatcaacaatcgtaatctcttttcctgcaaggatagtcttttcgccgtctttgctggtcgctgtggtatggatagagatttctttttcgtattcatcagtcagcgttcctaaatcaatcacaaggttatttcttgataccacgatttcaaaaggtgggataagttcaaaacctttgttactatcagagcgtaattcttcaatgatataggtatcataaggtaacgcacctttgctgtcatctggttcagaagttccaaaccacacaccgtcctcgctggtctttcctgcgtttgtattgtgcttatgagaagcccattcagcagaagtggagaattgcccgttatcatcagttaccacgacatgattttcgcccgtcatcttgcttgtgatcctaaagggaacattagcaagacgcttgtgtgtacctgcaccgatttttacaccctcaatatctccacgcttaatctgattatagatagaatgagcttcgtcggttaagtccacgatttttccgttttctgtgattgtaaaatcaatcggctttgcaccgtcagttaagtaaccgtcgggagcttcactttcaacgatacggaattttccataaggtaaaaggtcagaagaagtagaagcgacaccctcaatatcggtatggattgtttttaccacttcatttttcttgtataatttgccctcaaccaataccgcattatcatttaaggaaatgatgtcaaaagcagtatctttcaaggtagcacttccttgtggctttgtatcgcccgtttctaaatctcgtttctgaattttcacaccaccacggataaccttgtctgatacagaaaactggttacttccagtaagtacggcaaggtcgccgtcctctgtaatctgtgttacatataagccttttatctgttcggacttatcgccagcctgcatatatgcaccgtctaacaagtagccgtttggagctttcgtttcctcaacggttagcgttccaagtggaagaaccgccttgccgtcctgcatatagaagctatcgccagataccttgtatgcgtccgctaattttgcgatgtagtgagttgtcccgtcgctgtctgtttcagcgattgtctttgtaacccatgtacgagtagcttcggcagggagattgtctttattatagaagcctgcataatacttccatgtaaattccgcacctgctaaagaagcgttcccttgcggattgtctttctgtgtttccatatcaatcttgaaaagctcaatcaaagtgtccgttacttttggcgtatctgatactttcaaaattgctgtctttccagcttcaacctttaaggaatatatatttgtatcaaccttatatcctgctggtgcggataactccttgatataaactgtgccagcctttacctctacaacatctgtatttccgttttcatcagtcgtaagggtggcaagctgtttcgtgcagtccttatcagaaaagacaccgtagattgcaccagcgacagagtaattcccgttaccgtttgtaatgctggtattactggaagtcttttgtagtttcgcatttccgacattcagtttcgtccagaattgtcctaattcctgcccctcgccagagtagatataaccgccacattcatagcgtcctttattctctttgacaaaggcttttgcaccagagaaaacttcgtcctgtgttgcctttggaatttcatcataagaagctcgcacgttatcacattgccagccaagatgtacgctcaatctctgccagacaacacattgttccaacagatagacttgcttgtaattcagttccttgtgagcttcgccatactgtttgacatactctaaggataacgccacatctgaaatctggtcggcactcatgcgtgagcttgcgtcagctctggtcttgtaaccatttttgaaatctgtattgatgtcaatacaataggcagtttcgccctcaactttcatcatgccctcattgaatgtagaaccgatagaaccgtcattcattactttttcaatgataccgacccgctctgcactttccgtccagtattgcttactttctgcatgaacgggtgtactcggtaaagcagtaacgacagttgcaagagctaagaagcccgtacacaatcgtttccatgtctttttcataagtctaatgctcctttcattttgggtaataaaatagccgtccataatgaacggctgaaaatagaaaaggaacgtcatgttaggcgttccatagtctatgaaatattcaattttttcttgtttcaatactgatgtgctgtaccatatctttgcatatctaggaaaacttgcgtatcaaggctcattcaatggtagtaaataagtagtaaattgatgtgtttgtttccttgaaaatgctgatagatactgtgttttagcggataatcagatttttattgtgtttttaaaataaaaatatttgatttatttttagaaatatagtattttagttatataatcatatcagccaagagttttcaaaatattaagtatcatgatcggtcaacattggtgctacactttgaaaagtaagcatcgtttccaaattggaaaaatataaaaatttttaaaatttctcgatggaaatggtttattaatattaatataaggaaattgtgaaaaacaggaaattatcattgtacctgccgatacaaaaaataaaaatcacaggtcccttgagataaagacgaaacttttttgcaataaaatttgaattataatgagtcaatttaagatagacataactcctagaaaaacgtgagatggttcaatcaaatgttttttcatttgcagtatgccagtttgaatcaaaatagtaactcttaagataaacatatttgtagggtctataaaattagtcttgaacaggttagtagtttctttaggattcttaaaatcagtttttaagataaaattgcgaatctggtgtcataattatttgtgaggaaaaaatggtattatatatgtaagaattgtgattgatgctaggaagtctacttattttcttgtgatttgtattatgtttagttccatataaaaaaatatgctcaaaaaaatttgcaaggtttatacacgggaaagagagaggaatgactataacgatgaaaaaaaatagcaggctatctaaatctcgccaatttattcttttagaaatggttttctttttgcatacaggtataattggtgcagtttatactttgtatttgttatcactgggactttctttgtttgaggctaacgctattagcgcaatatttaatattgcagctattgtttttgaggttcctagtggcgcaatgtgtgattctattggaaaaagaaaaacatctctttttgcgggtgttacattgtttttagcgatgttgtgtttcctaagtagtgttaatatattagtgactgtaatgggacaggtattttgggggcttagttatgctcttgagtctggaaccattgaggcttggttcgtaaatgacggagctttaaaggggaatgaattagatagagtatttgctgcatcaagtaaaattcagagtgttataatgatagttggtagttttattggttcttggctagcggactattctttgaagtttatttggttaattccctgtatatcttcagtatgctttataatcatggttctaaagtttgtagaagataagaaagagatacaaccgaaatcttctattttatcattatataaaacatctataaaatacataaagataggtggaagtttgatcgtaaaaaatcaaagaataacttatctatacatttttgtgactttaatgggatttatttcctcaccacttatgattttttggtctgtgtatttaaaacagattgattctggtttttcatatatgtatttatcggttatatgggtttttattcaagtatctattatcataggcaatcaaattctagagattattgggaagtacattaaacgaaaaaaaatattaatggttacttttttgatttttggacttagtattttgtttatgaatattaaaaatggagtaatggtggttatagttctgatttgtatacaagaaattgtttggacaatgatttgttccattcaaagggggcttttaaatgattatatagatgaccagacacggacgacgatgatatcgttctcatctttgttcaatgcaatcggtaaaattagtgcatctgtattatttggttttctagcggatagcttttctatactgtttgcgtggacaatatctggtgtattatcattatttaccatttggtttgtgcatattatgtacaaaaaattagattaaggtaataaataaatttacatagggaggtattattatggcgaaggtagcatttgtttcaattatgtggcactcacgatttgtagaagaattgggagtggaatatctaacagctgtattgaggaaggaaacaaatcatgaagttaggattttttataagtttccagaagacaattataacgatttctttcaacaggtgattggatttaatcctgatattgttggaatatctctttctcacaagtatacgggtttagagccattgtatgcaggagcatctttacttaaagagaagttgccagaagtgtatctttgcattggtggaatttttgcatctactaatgcagaaaatatcatgcgtaagatacaagaagttgactgtgtgttccttggtgaatctgaaaatattattgttgattttgtggataaggttattaatcatcaaagtattgatgctttagatggggtggtttaccgttgtgagaatggaacgttgaaaacgattcctaaaaaaaattttattatggatttagatgctattccattcccagcgagagattatatggaagaggattggtttaaaaatgatccgtttaaaatggtaaatctcatggggtcaagagggtgtcatggacactgtcatttttgcaatgtacctagtatgtatgctgtttatggtacagaacattgttggagaggaagaagtattgctaatattgtagatgaaatggagtatctatataaggaacatggtgttttaatatttagttttaatgatagcagttttgaagatgctatgccattaacagagggcaagaagcgacttgctacatttgctaatgaaattttaaaaagaggtttaagaattctctggacatgttgttttagagctgaaacttttaaaaataataaggaagatattgagctgattgagttgatggttaaaagtggattgtacaatttgctgattggagttgaagctggaaataaacgagctcttaataatttttctaagcgagcgaccattagtgataattatcaatcaattgagatttttgatagatatcctgtatatatttcaaaaggctttattatgtttactccgcaatcaacaccctctttattacgcgataatttagaatttgcacatagcggtacttcgtaccgttaaaaatggaatagccgttccgcagtagcggaactggcattccgtttgagcgtaatttgcacttgataaactggataatagatatgctgtgctgagccttgccgttatgagtgcgcttgtagaggcgtccggcatagtattacaggatgacatgagcagcaatcccattttcagcagtctgtttgagcggcttaccgcctgtatagtaacagtatttatatttgcagtaaactattttttatcagggtattgtgatttccctaaatggttacagactatcggccgtgacagcatgccgttttatgcgatgaatgtgatatttgtaggtggaatcaggattatattgaacagggccggtataaccaatatggcgctgcagtgtatatgtggatttgcaggaagcactgctatatgctggatattgtatgagtgtatcataaagaaaatcaggcttatcaattttatattctacccgggtaaacagcttcatatcagaaaatgataaatatgaatcagggtgttgttttttaatactaatccgctatactatatagtgtttactgaaaaaatatcaaaataaagcgttttaatagaaaaggaaacaccatgaaatttattaaaatctctgcatttgcaatagtcctcctattgctcatgcaaatagtatcaaaggcatttattgccattgacagcagcgatattgaaaatatatatggcttttacgcagagccagagaacagccttgatatggtcatgattggaccaagtgaggtatacacgggctatgcgccggctctggcgtgggaggagtatggccttaagtcgtgcaatctttcaataggagctgtgccatgcaatatgtacaagtccatcgtcacggagattgtgaagagacagaagccgaagcttcttgtaatcagtgctgcagcatttagtcagggcaattggaatctgactgatgaggtttatctgagaaagtggattgacaatatgcctatgtcacagaacaagcttgacacggtaaagactattcccaaaaatatcaataaggatgatgaaaaggtgaaggataacatatcggataccctttattttccattggaaaagtatcatggcaactggaaggaccctgaggcggtgtatacctcatttgtcactcgtgcctatatgaggctcagtggtggaggctatctgaaaggcttttattcaaaaacaggcatcaccggaggccgtgacaatctggcaaatatcggacagcctactaaagaagcctatatgctgactgatgagtgcagggcatatcttaaggagctgctttcgtactgcaataagcttggcatagagcatgtgctgttgctgcagccacctcatgagacacaggcagctgacaagtcgggtcttgagcagattgaaagtataacgaaggagtatggatacgattttcttgacctgagtactgattatgagagcattgcagggatagatgattcccatgacttcgctgattttgagcacttgaatgcttatggtgccaaaaagcttacggcatatattggcgatatggctgtgaatcaatatggtataaagtctgatacggcaaaatcagagctttcaagatggaaaaagtctgtgaagaggactaaaaaagctctgaaaatggcaagagaatatactgacagaggagaggcacaggtggttggagagtatgaggcagccaaataagtgaagctgccggggaattaagcgttgcagaatggtattatttagtggcatttgattctggctttgatgagccttatgccttcacataccatctcgtcacgcatcagtacaagcagcaccatatagactataaatccggtcacaatcataatcattgtgtgcatgaagctgactgacagccttgcatccatgagcagcagtactataagcatacagactgctgatatgagatatttccacgatagagaaaatatttttgggatgctaagctcatttcgtatgaagtaaagctgtacggcagttattattacctccgagatgacagaggctatggctgcaccgtatgaatagagctgatgtatgagaatcatattcatgacaaaattggctgcggctccgatacatactgagcgtgtcagcaggctttcacgcttggttgttaccagatactgtataccgattacattgcttaagcctataatcggcaacagtgtagccattatcatgatgagatatggcaccttttcatatcccggaccaaaaaaccatggcgagaaattgcgtgcgatgcctatcaggccaaagcacagggcaagacctataaaccagacgaattgaaagctcttataaaggagggcttttacttcgtctggtttattttcactgaaggctcttcctattcttggaagcatcacagtaccgagtgaggttacgagcatgagaaccattttggatatcttattggcctgctcatagtagccgttttctgtcatgctgcctgttatgttgttgagcatggttttgtcaagcgctgtgtatatggttgtagctattgtaggtacaaagagtgtgagtgtagcccttagatgagagaatggcttaagctccttaagctttggtctgtcaacatattgaggcaggtaaaaccagatggatatattggcaaaaagctctaatagacatattcctgccacatatatgagcaaatcactctctgagcgtacggcgatgaagataaaagcaatgtttatgattttaaaaatcacgtttcgaccgactattttgccaaattcctcaagtccctgaaacagccaggagatatcagaagcaactgatatcaggtacacggcttcaatcaatagcaggtgctttttgagcggtgagtgcccaaatgcaagtgtgaataccatatatgcacacagacacacaatcacgctgatgacggatagaagctctatctcccagaaggttttggtgcgttttgctctgtcctcctgcaggtatgatatttccctgtttccgtagtttacagtgcccagtgcggcaaacatgataaagtatgataccagtgagtaggtatagctgtatgcacctattccgtctgccttaagcaccctcgagaggtacggcgctgtgataagcggtgtgatcagtgtgagtatctggtagctcacattatatatgtagtttagttttatactcttgtttttttgtgttttctttttcatgcagatatcatatcacatattgacttattttggctatgcagttattatataaaaatcgcaaattaacattactatcaacttacacgtataaattacgacagagttatatagcctgtcacataggtggagaaatggataatattataatacgaaacaggaaagaggagtttaaggagcttgttttatacgcggtttttggcaatatgacctttgtgatcagcataggcgcatatgctatttttaatgttttgtttggaatcaatgagctgattgcgaatgcgctggcatgggtgtttgctgtacttttctcatatgttaccaacaagaagtgggtgtttaaggttgctacgccgacaaagacggcgtttttagtacagatgtttgcttttttcagtggcagatttatcacactggttattgaagaggctattatctttatttttatcacgcttttggactatccaagcatgtgggtgaagcttgcagcacaggtggttgtggttgtgctcaactatgtcataagcaagctgtttgttttcaaaaatcgctaaatgtggtatatttaataaaataataagaactataatagtgtgtgtatggtataataaagcgtaaatttaaatgcagtttatgagaagttgatttgcatagggatatagaagctgctttttgcagtgtaggacaaaaggagaaaattctatatgagtaatagacttgacatgaaaaaagatacaaataatctaaaagacaaaacaaaatgcgatggtccggagaagccggattcatacatgggcaatgacaagcaatgggttttcagggcattggttcttgcatttgttgatatgtgtattattgcaatctcattctttttcgctttgatgatcaggtttgagttttcatattcacatattccgctctcatttttggaggggtatctgcacattgtgccattgtttatggtgatttcacttgtggtgttttatattttcaggctgtatcacagtatatggcgctttgcgagcatcaatgagtttatgcatattattggtgcctttctggtgcttacggttctgtgcgttatcattcatgaggtgtatgagattaagatgccgtatgccttctggattatcggactgatgctcagctttgcactgtgcacagcgtgccggtttgcgtacagatttatcaggacaggccagaagatgcttgagcagagaggctttgcaaacggtgatgagagagtcatgattataggagcaggaaatgcgggcaggatgcttatcagagagcttatcatgagctcacatctgcacacaaaggcctgctgtatcatagatgacaatccggcgaagctcggccgcttcatagacggcgtgcctattgtcggcaatcgaaacgacattccggagatggttgagaagtatgatatcacaaagattgtgtatgctgtaccttccacatcgggtaaggacaggaaggatatactcaatatttgtaaggataccggctgtgatgtgtctgtggttccgggaatatatcagatggtggacggcagggtttcggtttctaatctgcgtccggtcagtatagaggatttgcttggcagggatccggttgttgtggataatgatggtattcattcatttttacagggcaaggtggttatggttacaggtggcggtggctccataggtagtgagctttgccgtcagatagccagagaggacccgaagcttcttatcatttttgatatttacgagaataatgcatacgatatacagcaggagctgaagcgtaagtatccttatgtaagggtggagacgctgattggctctgtgcgcaataccaacaggctgcactatgtatttcagacatatcatcctgagattatctatcatgcggcagcacataagcatgtaccgctgatggaggagagcccgaatgaggcaataaaaaacaatgtgcttggcacattaaagctctcaaggcttgcagcagagtaccatgtgaagaagtttgtacttatctctacagataaggcggtcaatccgactaatatcatgggcgcgtcaaagcgcctgtgcgagatggttatacagatgatgaacaggcagactgggactgattttgtagcggtacgttttggaaatgtgctcggaagtaacggaagtgttatcccgctatttaagaagcagatagaggatggcggtccggttactgtgacggacaagcgtattattaggtactttatgacaattccggaggcggtggcacttgtactgcaggccgggctctatgctcatggaggagagattttcgtactcgatatgggcgagcctgtcaagattgatgatatggcaaggaatcttatcaggctttcgggactggagcctgatgtggatatccagattgtatacacaggactgcgtccgggcgagaagctctacgaggagatgctgatgagtgaggagggtcttaaggagactccaaacaagctgattcatgtgggtgagcctattgagatggatgatgagctctttgagaagcagcttgagatgctcgagaaggcatgcacctcagaagcaaaggatatcaagcagatagttgcatctgtggtcaagacatatcatcctgacctggaggactaaatatcttttgaagctcataatatagattgtaaaagccggatgtttggcatattttatgccggaagcgaggaacataactatggaaaaaagacagatttcattttcaccacctgatataacagaagcagaggtgtcagctgttgctgatgtgctacgaagcgactggattacaacaggtccaaggactaaggaatttgagaagaggattgctaagctatgcggcacgaataaggctgtggctctgggctctgctactgcgtgtcttgagtcgatactcagattcttaggaataggtgcaggtgatgaggtcatcacaagtgcatacacttatactgcatctgcaagccctgctgtgcatgtcggtgcgacacttaagtttatagacgtagcacctgattcctttgagatggattacgaggctttggaggctgctattacagaaaagacaaaggttatcgtgccggttgatattgcaggcgtgccttgcgactatgacaggattttggatattgtggaaagaaaaaaggctctttttcatccgtcaaacgatgtgcagagggcaatcggacgtgtgattgtggcggctgactcagctcatgcttttggcgcctcatacatgagagacggtgagcggattatgtgtggcaatgtagctgattttacaagcttttcgtttcatgcggtcaagaatctgaccactgcagagggcggagcactcacctggagacctatagagggctttgatgatgagtatatctacaagcagtttatgctgctttcactccacggacagacgaaggatgctttccacaagaatggtcagggcaactgggagtatgatattgtggctccttcgtataagtgcaatatgactgatatccaggctgccattggtctggtacagcttgacagatatgatgggcttcttaagaggcgccgtgatattatagagcgctatgatacggcatttaagccgcttggtctcttgactgtgcctcattttacagacaggcatacatcgagcggacatctgtatctgcttcgcataccgggcatcggcgtggacaggcgcaatgcgcttatagtgcagatggcggagcgaggtatcgccacaaatgtgcatttcaagccacttccgatgatgacagcatataagaatatggggtttgacatagctgattttccaaatgcttatcatcagtatgagaatgaaattacacttcctctcaacacaaagcttagcgatgaggatgtggagtatataattaataatttattggagattttacatgagtagatggagaacatggggagagattcctacattcatgaaaaatgattttacacttaaatattacaggcatctgagcagaaagaggacaagcatggtatttaaacgcatttttgatgtgattatgtccgctgttcttcttgtgttgctttcgcctgttatactggtccttgctgtctggataaaggtggatagcaaaggacctgtttttttcaggcaggagcgtattacacagtatggcaggaagtttcgcatattcaagttcagaactatggtgaatgatgctgacaaaaagggctcactggtgactgtcggtggggattcaagaatcacaagggttggcgctgtcatcagaaaatacaggcttgacgagattccgcagctcataaatgtgctctgtggtgatatgagctttgttggtacaagaccggaggtggagaagtatgtcatggcatatacacctgcgatgatggcaacacttctgatgccagccggaatcacaagtgaggcaagcatcaggtacaaggatgaggacaggcttcttgaggcttcggatgatgtggattacacatatatccacaaggtgctgccgggcaagatgaggtacaatcttaagtatttaaagaagttttcgctgacaaatgacatcaggctgtgcatagagactatgcttgcggtgatacattaggctgcttgtcggggaggataatatttatgaataaagttaaattttcagtattactgtcaatttattacaaggaaaagcctgagtatttcagggagtgcatggaaagcgtatattcacagactgttttaccggacgagatagtgctggtggaggatggcaggctgacagatgagctttatgaggcaatcagtgagtatgaatgcaggccttcggagataaattttgttacggtaaagcttgaaaaaaacagcgggctcggtcttgcccttgctgaaggcataaagcattgctctaatgagcttgtggccaggatggacacggatgatatatgtgtgcctgaccggtttgaaagacagctgaatgctttttcggaaaatccaaagcttgatatcataggtggctacatcagcgagttttccgatgatacgcataatattttatcagagaggacagtgcctcttgggaattatgtgataaagcagtatcagagaaagcgcgatgcgttcaatcacatgactgttatgtacaaaaggtctgcagtgcttgctgcaggcaattatcaggattgtctgcttatggaggattctcttctttgggcgaatatgatcagaaatcactgccgtatggcaaatataggtgagactcttgtgtatgccagaaccggtgatgatatgctaaggaggcgtggcggctttgattatttccttaaatacaaagccggaagaaaacgtattttaaagacagggaccataagcgcagccgattattttgttacgatttcggcacagcttgttgtctgtatgatgccactttggatgaggagccttgtgtttaaaaaaatattaaggaactaaaacttttcaaatgcacgttaatgtggtaaaatcggtatagttaacattaataggcttatttactagctgatacaggaggttaatataaatggattttagagcggagtacgaaaaatggtgcacagacccatattttgatgaggctacaaaggctgagcttaaggctatcgcaggtgatgataaggagatagaggacagattctatcgcacacttgagtttggtacagcaggtcttcgtggtgtaataggagccggcaccaacaggatgaatatatacacagtccgtcaggctacacagggactggccaattacatactttcacagggagaggacgcagtaaagagaggcgttgcaatcgcgcatgactcacgtaatatgcatgatgagttcacagatgccacagcactctgccttgcagcaaacggaatcaagacatatgtgttcccacagcttgcgcctgttcctgagctgtcatacgcagtaaggacacttggcacaatagccggtgttgttatcacagcaagccacaatcctcgtgagtacaatggatacaaggtttactgggaggatggcgcacaggttactccacctcatgatacaagcatcatggctgaggtggcaaaggttacatcgtttgaccaggttaagactatggacaaggctgctgctattgaggcaggcctttacaatgtcatctctgatgaggttgaggaaggatatttcggagagcttcgtaagctttctattcatcctgagatcatcaaggctatggcaaaggatatcaagattgtttacacaccactccacggcacaggacttcgccctgtacagagagtgcttaaggatatgggctttgagaatgtatacattgagccaagccaggcagtacctgacggcaatttccctacatgtccttatccaaatcctgagaatcctgatgcatggaagctcgcgcttgagctggcaaaggaaaaggatgctgatatcgttttagcaactgaccctgatgccgacagactcggtgtatactgcaaggatacaaagacaggtgagtatgtgacatttacaggaaatatgtcagctatgcttatcggtgagtacattttaagccagaagagcgccaatggtactctgcctgagaatcctgcatttgttgagtcaattgtttcaacagatatgggtaaggcaattgcggcagcatatggcgtaaagcatatcgaggttttaacaggcttcaagtatatcggtgagcagatgctcaaattcgaaaagaccggctgcaacaactatgtattcggcatggaggagagctacggatgcttacctggcacatatgcaagggacaaggatgctcctgcagcagtttgcatgctgtgtgaggtggctgccttctacaagtcacagggcaagacactctgggatggcatgattgacatgtacgagaagtatggctactacagagagggtatttccacaatgaccttaaagggcattgatggtgctgcacagataaatgagattatgacaaaggcacgtgccgctgagccaaagaaatttggtgattatcaggtgcttgctatccgtgattacaagaatgacacaagaaaagatatgacaacaggaaaggtcgagccgacaggtcttccttcttccaatgtactttactacgaacttaacgataacgcttggtgctgtgtacgcccttctggtacagagcctaagattaaattctatttcggagttaaaggagtgtctcttgaagattcacaggctaagcttgatgctttgtcagctgaggttctcggacagtttgaataaagactatgatgaaaatatacatttgcccggattgtggctggatacggatggtttcaagaaggaaagaggttgaatgcttcaagtgtggcaggccgcagatgcgtctgacgaatctggagtttggaaagtataccaatatgtcagagaaggaacgtcaggactacgcagacgcgtggctttacattcataggaaaaaggaaaaataacatggcaaagaagagaagaagaaaaaagagaagaagtggacgtaagaagattatactctttgtatttgaaatcctgctgctgttaattgttctgttagtggtttgggcttataataagacactcggacaggttaaatatgaggatgcgctgacaaatagtgaggccggaatcaatgaggagattgatgaggatgttcttgccaatatgcatggatatctcaatgtagcgttgtttggtctggacaacagaagtaatggttcatacgatgaggggcattccgattgtatcatgattgctagtctgaattatgatactaaggaggttcagcttgtttctgtctacagagatacgtatctgcctataggcaatggaaagtttgcaaaggcaaatgccgcttatgcaaatggtggggcaaagagagcagtagctatgcttaattcaaatttggatttgaatataaccaagtatgtctgtgttgactggaaggctcttgtagatgctatagatgatatcggtggccttgatcttgagattactaatgcggagatgaaggaaatcaattatctgattcctgaggttgattatactacaggatataatactccttatcttgagggggatggtatgcagcatcttgatggaactcaggctacatgctatgcacgtatcagaagcacctcaggtgatgatttcttaagggcatcccgtcagagaattgtgcttcaggctatgcttgacaaggctaaacagtcagatttaggctctctaacagagatgtgtaaggatattatgagtcagataagtactaattttacagctaaagagattatccagtatgcaacagctgttacaaaatatcagatgaaggagacaacaggcttcccatttgagctgactacaatgaatctgtcaactactggcgataccgtaattcctatagacctggcacagaatgtttctaaacttcatcagttcctgtttaatgagactgattaccagccaacagagacagttcagacagtaagtgataagattgctaaaaagacaggtgttacatctaagacttcagcatttgatctcacgcagtacaatgatactgttggctctgatggaaccgaaggggcaaagaaaaaaaataaggacaagcaggatgccctgaaaaagagccagtcagaatctgaaaacggttcagaagaaaaatcatcatcagatggttcggatgattaaataattaaagttagctattagggagattatttattatgaaaccggaaatcaaagaaaaaatcacggcaacaaaccagaaatacttaaagaaattcttaacagaggaagctccggctaagcttgagagccagcttgagcacatggactggtcataccttgatatgattcacaacaaggagcagcagagaggtacattttcaccgcttgctgctatggagctttcagagatagaggcaaataaggacaaataccttgcaacaggtcttgatgctgtcaagaatggcaaggtcggtgcaattcttcttgccggtggacagggtacacgtcttggctttgacaaggctaagggaatgttcaatatcggaaagacaaaggaactctacatctttgagcagcttgtctcaaacctcatgaaggttacaaatcagaccggtacatgggtgcctctgtatgttatgacaagcgagataaatgatagcatgacaagagagttctttgaagagcacgactattttggatacaacaaagactatgtgaagtttttcgtgcaggagatggttccggcagttgattttgatggaaatctgctcatgaaatctgaggattcacttgccatgtcaccaaacggaaacggtggatggttcaagtcactcatcaatgccggtcttgacaaggatttgaaggacaaaggtgttgagtggctcaatgtatttgctgtggacaatgtgcttcagcagattgcagatcctgtatttgtaggtgctacaatcgagtccggctgtgtcagcggctctaaggtggtcagaaaatgtgatccatatgagagagttggtgctatgtgtcttgagaatggcaagccttcgattgttgagtattacgagcttactcctgagatggcagaggcaaagaacgagaatggttcattgcagtatggctttggtgttatcttaaactatttattccgcgtggacaagctcatggctatcgcagagaagagccttccacttcatgtggtagagaagaaggtaccttacattgatgagaatggcacagagcacaagcctgagactccgaatgcatacaagttcgagacactcatactcgatatggtatacatgatggacaatagcctgccatttgaggtagacagagagaaggagtttgcacctgtaaagaatgcgacaggtacagattcagttgaaacagcgagagctcttcttgagaagaacggaattgaaatttaatatatgatttatggtaactgttcattggcagggatgtattgatattctgcaatttctatttatcgcagacttagaggtgcatctgccgatgagcagttatttttataatcgcatagtggcctgcaatggggaacataggctataaatagttaactgatttatgaaaaaataaataatcccgtcacaaattaaacacagattgacagtatacttctaattgtaaacgaaaggagaaattattatggataacaattatagaaatatgaatgatacaaacaatacaaataatactaacagtacaaataacaatacaaacaatgtaaatttcacaatgtcgggtaatccttacaatccggatgagtcacagaaggctgcacagactaataatacatcagctgaaagctattcacagagctacaatccatattcgcaggcttctgcagcaggacagccaaatgcaaatcagtcatatgcaaaccagccttattctaatcagtcgtataattcaggcacaaataataatgcatatggcggcacatcagcaggttcgacagacaattcatatagccggatgaatatgaatggtcaggcataccagcagactgcaaagcctaagagacagagagcacctagaaagccgggtgcatttggaccatttgcagcaaagacagtagcggcagctcttatcttcggactcgtcggaggcggcgttttcacaggagtaagctatattggcacgagagctatttcaaattcttctactgcaagtgcaaagcttacaactacaacatccggtgggactaagcagacatcctcaggggatgcaaaggatctgacagatgtatcatctattgtcgatgaggttatgcctagcatcgttgctatcacaaatacaggaacagtcacctacaacagctttttcggaaagcagtcacagcagtctcagagctgtggctcaggaattattgtgagcgaggatgatgattatctttatattgctacaaacaatcatgttgtggcagattcagaggagctcacagtacagtttgatgatgattctgtggtaaaggcagaaatcagaggaacagatccggatgacgatcttgcagttgtacgtgtaaagaaagcggaccttggaaaagatacttactcaaatatcaagattgctacaatcggagattctgatagtgtagctgttggaagctctgcaattgctatcggtaatgcacttggatacggacagtctgtcacaacaggtatagtaagtgcacttaacagaactgttactacacaggattcacagacaggtgagactgttaccaacaacaagcttatccagacagatgcagccataaaccctggaaacagtggtggagcactcttaaatgaaaatggcgaggttatcggtataaactctgtaaaatattcttcaactgaggttgagggtatcggatatgcaattcctatgtcggttgcaaagcctattattgagagccttatccagaatggaaaatatattaatgagaatcaggcataccttggtatcaagggtggtgatgtttcatctgagatggtagcctatggcttcccacagggtgtgtatgtttcatctgtttcagctggttcaggtgccgcaaatgccggcttacaggagggagatatcatcactgctattgacagcacaaagatttcttctatgacagagctgcagtcagcgttaaagagctacaaggccggagataaggttactcttactgttgcccgtcagagtggcagacagtacgaagagagcaaggttgaagtaaccttaagctctgcgaaggatgtccagcagtaattccggcgcgttttctcctcacccctgcgtccatgcaggggtgtttttgcgtttcatgggcataatttctacagtatctaagccacttcgctattcgctcctgcaagagtacgtgtgcgccaccggtgcccggggcttacgtcccttacgctgtggcggaaatgttgttcaaatcagttcaaagtactagacaaattccacaaaatattagataatagaagcaaattagttttcattttgcataggaggtcggcatgaagaagaaaaaaatagttattgcactcggacatgatgctcttggaacaactcttccggagcagcacgaggctacaaagcatacagcaaaggcagttgcagattttatcagggacgattatgaggttgttatcacacacagcaacggaccgcaggtgggcatgattcacaccgctatgtctgagttttgcaggatttatcctgagtatacagctacacctacagctgtctgctctgcaatgagccaaggctatataggatatgatttacagaatgctatccgtacagagcttctcggcagaggaatttacaagaccgtttcaacaatacttacacaggtggttgttgacccatatgatgaggctttttatcatccgacaaagatcattggccgtgttatgacagaggctgaggctgaggaagaagagaaaaagggcaatcatgtgacacaggttgagggaggctacagaagagttgtggcagctccaaagcctgttgatatagtggaaaaggatgctattaaggctcttgttgatgcggatcaggttgttatcgcatgcggtggcggcggaattcctgttttagcacaggacaataagcttcagggcgccagtgctgttatcgagaaggatcttgcagcaggaaagcttgcagatactcttgatgctgacagacttgttatacttacaagcgttgacaaggtctgcctgaactatggcaaggaggatgagaagccgcttgataccatgactgtcgatgaggcaaagaagtaccttgcagcaggcgagtttgatgagggtaccatggctccaaagattgaggcggctatcgactttatcggtgactctgccatccgttcggtgcttatcacaaagctcaacaaagagggcaagacagtttcaggtggtatgggcactttaattacaaagtagagcttaattgttataattcacatatatcccacacgtctatatgcattttgcagagcagatgtgtgggattctaaataaaaagagtaagatagaaggtaacacaaaatgagtgagaaaaggcttcaaaagagagatgaaatctcagacgagtacaaatggaagcttgaggatatgtatgagacagatgagctgtgggaggctgagtgtgaaaaagcgtcacagcttgcagaaaagctatccggatttaagggatatctggccgacagtgcagcaacgctgcttgatttttttaagaagcaggatgagctgtcttattatttggagcgtatagtggtctatgcgaatgagcgttcgcatcaggacactgccgtgtcgaaatatcaggcatatgtgtcaaaggcagagacactgactgttcaggcatcaggtgcgctggcatttgcgagtccggagattttgcagatagatgataaaaggcttgagagcttttacagtgagagcaatgagcttgtgcactataagcgtgcgattgatgagataatgcgtcagaaagagcataccttatcggctgcagaggagaatatcctggcgcagtgtggtgagatggctgcagcaccggagaatatattcagcatgttcaacaatgcggatatcaaattcccgtatatcactgatgtcgagggaaataaaatacgtatcacgcacggcaatttcatagattttttaagcagcaaggacagaagcctgcgcaaacaggtgttccgcggagtgtatgattcgtacaagaagtggagcaatactgtttcaatgatgtacatcagcaagctgaaaaatgacactttttatgcaagggtaagaaaatatgacagcgcaagggccatgtatttatccggtggcgatattcctgagagtgtctatgacaatctgattgagacggttcacgcacatctgtcggctctgcacaggtacatggcgcttaggaagaagcttttaggtgtggagcatctgcatatgtatgatttgtttgcaccgatcgtggacaatgtacagaccacatacacctatgatgaggcgaaaaagcttgtggcaaaggcgcttgagcctatgggcgatgagtatgtcagcacacttaaggctggcatggagagtggctggatagatgtatatgagaatgagaacaagagaagcggtgcgtattcatggggcgcttacggcactcatccgtatgtgcttttgaactatgccgacaatctggacagtgtgtttacgctggctcatgagatgggacatgcgatgcatacatactattcaaatgagcatcagagcattacctacgcgggatacctgatttttgtggcagaggttgcatccacctgcaatgagtcgcttctaatgaactatatgcttgagcattgtgaggatgagaatgagagaaaatatctcataacacattttctggacggcttcaggacgacacttttcaggcaggcgcagtttgcagagtttgagcatatagctcaccggaaaatgcaaaagggcgagccggttaccaaggatgtgctaaatgagctatggcatgagctgaatgtgcagtactacggaccggatatgcgcgtggatgatgagatatcatatgagtggatgcgcataccgcatttttacacaccgtactatgtatatcagtactcgacaggctattcggcagcagttgctttttcaaaaaagatacttgaggagggaaagcctgctgtggataagtatataggaaatttcctgtgcggtggatgctcgaagaatccaatcgagctgctaaagagtgccggtgtcgatatgagcacaccaaagcctgtggatgacgcactcaatgtatttgaggattatctgaagcagtttgaggcagcaaataagtaaggagaaacatttttatggaaagaattaaaagctttacaatcaatcataatattcttaaacctggattttatatttcaagaaaagacggagaaatcgttacatacgaccttcgtacaagaaaaccaaatgcaggcgattatatgtccaattcagctatgcactcagtggagcatatgtttgcaacatgtgtgagaaactctgagattgcagatgatgtggtatattttggaccgatgggctgtcagacaggcttctacctcgtagtgagggatgttgagccgggaaaggtttttgaaatcacaaaagaggtcttaaaacagatactagagtatgatggaccggtgtttggtgcatcagccatagagtgcggacattacgagaatctgtcacttgacgaggcaaagaaggagtgccgtgcatatcttaaggtacttgagagccagacaaatatggagtttacttatccacagtaaacagatattaagctttgacaggaattgtattgagtacaggaaaatctgatgcttacatgtgcgtatgacgcatcagtcttgggctctcagtggttctggatagttatatagaaagataatgtaatagcaagatagcaggaatggagaaataaaatgacaataggtgtaattggtgcaatgcagatggaggtcgatgacttaaaggctcagatgacagacacacagacagaggtttacagcggagtggagtttgttgagggcaaaatcggtgatcagtatgttgttgcggcaaaatgcggaataggaaaggtatttgcggcaatatgtgcagaggccatgattttgaaatatgatgtagatatgattgtaaatatcggagtggctggtactttgacaaaggacttaaatgtgcttgacgtggcagtagcaacaaacgtgctgcagcacgatatggatacatcgccaatcggagatccgaagggacttctctcaggcatcaacatgattctgcttccggctgatacaaaaatggtggagctcatgtgctcatgcttagctgacaggaatatccactataaaaagggcaatatcgcaacaggagatcagtttattgccacaaaggagcagaaggattatatttcgaatacctttgatgcaatcgcagcagagatggagggaggcagcatcggtcatgtgtgctatgtgaacaatgtgccatttgccattcttcgctcaatatcagacggcgatggcggcgagacagactaccagacctttgcggagaaggctgcgcatcagtcgattgaggtagtgcttgagtttatcggaagggcagaagaactgaaatagagttatttcattattcataatttgtgataataaagaatagtatatagcatgagtgaatacagagcatacatgcaaaatacaaaactacataatgggacaaaacgaaagaaacgccgacacagattcctttttggagtgctgctgtcggcgcttcttattacaggcgctttatatggcaaagaatatgacatatcgcagctgaaaaatatagaggtgatggagacacttagcagtgctgtgagtcagttcggagacagaaagctgcctgtatattcggttcagacaacggaaaaaaagatagccctttcatttgactgtgcctggggagcagaggattttgacagtatgatggagacacttgacaagcacaacgtaaaggctacattttttatgacaggagggtttgtgagtgataaccctgaatgtgtaaagacgctggttgaaaaagggcatgagcccggaaatcacagtgagcaccactatgatatggcaacaatcaatgcaggcgagatgaagacagagataatggatgtgcacaaaaaggtcaaggagctgaccggaaaggatatgaaggtattcagaccgccatacggctcgtacaacaatgaactgattgacacagtgtatggctgtgactattatccaatccagtgggatgtggattcgctcgactggaaaaactatggtgtgcaaaacattatagatacagtgtgcaatcacaaaagcctggattgtggctcgataatactctgccatctaggcgcaaaatacacctcgcaggcactcgatgagatgctcacgaagctgcaggacatgggctatgagatagttccggtatcaaagctgatcatgactgaaggctatcatatggatgcaaatggtatgcagatcaaggactgagtaatttcataaatcaatattttagtcaatatttagtcaataatttagccctttacgatattgttatttacagacaagtgtgttaaactaaaactatattttaaagaagctgtgagacagctatgggggtaaattatatgacagatacaggttttttagtagcattctttatagttatttttttagttatcatctttgcgcttgtcgctgtaatcggagccgttacaagtgctgttgcaggtatcaatgatgatgaggatgagattgaggaagagggcatttgaagatgaaataaataaaaaatcttaaaagagattaaaagacatttaaggacatcgaattatattaatcgtataattgggtgtctttttttattgttaaaaactcttaaaaaagtataaaccaattgagttgcaatccgacacattgtataataaaagtataacagcgaattaaatttattgtgaaaatcgcagtaatcacattgtctatcaaactaaggcaggacattatcaaagaaaagaagaaggaggggtcagatgatatcaagatatagtgtaaaaaagccttttactgtacttgtaggagtactgctggtaatagtgctcggtgttgtatcgcttggcaggatgacgacagatctgctgccggatatgagctttcagtatgcacttatcgtgacaacagatatgggagcaagtccacaggaggtggagagcgatgtcaccgcgccgcttgaagcagctatggcaactacgtccaatatcaaaaacgtaagctcaatgtcatataacagctattctctggtgacatgcgagtatgagcagaatgccaacatggattctgtagtgatagagatgcagcagaaaatagatcaggtcaaggctggctggaaggatggagtgggtactccgaccattatgaagataaatccggacatgcttccaatcatgatgactgctgtggatatggatgggaaaagcaaggcagaaatcacagactttgtggaaaacacactaaagcctgcaattgagagtacagagggagtcgcatcagtgactgcgacaggtgagctcaccgagcagatacaggtcacgatgaatcaggccaagatagatgcgctcaatgagaaaataaataatgccgtttcaaagaaatttgacgatgcaaaaagtcagatggatgatgcaagcgcaaagatagagagcggacaaaacgcaatctcatctgcatcggatcagatgagcgcgggagtggatacgctaaaggaacaaaaggcaaagcttgcagagcagaagactcagctagagagtactcttgcaagcttaaatgagcagaagactcagcttgaaacaattcagtcagctctttcagacttcatgaatagtgatacatatacaaagacaattccgtcactcatagagggcgcaaatgtaccgggtgaagcgggcacagcactcaaagcgcagcttgagcaggttgataagcagattgcaacacagttttcaggactctcggcgcttggaatcaccgtaaacacagcagatgatctgcctgcggcagcgtcagcgatagcacagactctcattcaggtgaatacaggtatagagcagtgccaaagtgggcttgaccagatagcacaaggagagacagcacttttagatgcctatgataatctaaacagtcaggcagccatcagctctataagtataggacagcagtcggcacagcttgcaacagcagcggcatctcttgacagctcaaagaaggagcttgaaaagagtaaggatgatgcacttgacaagtcaaacttaaatgcagttttaacaatcgactcgctctcgcagctgctcgtcgctcagaattttgatatgcctgcaggctatgtaaatgattcaaatggcacgcagtacatagtacaggtgggagatgaaataaaatcaattgatgatttaacaaatctggtgcttatggatatgaagcttgatggaatagctcctattcatgttggtgatgtggcagatgttgagatgactgacaactcggatgagacatatgcgatagtcaacggtaatcccggaataatgctctccatggagaagcagaccggctactctacaggagacgtcacagaccgtcttttagacaagcttgattcgctggaaaaggaaaatgacggattacacaccacagtgctcatgaatcagggcgtatacatcgacatggtagtaaagagtgttatggaaaatatgatagtgggagcaatacttgccattttcgtattgctcttgttcttaaaggatataaagccaacacttgttattgcagcatctataccgctatcggttattgtggcagtggtgcttatgtattttacggatatcaccttaaatatcatttcaatgtcgggacttgtacttggaataggaatgctggtggataattcaatcgtagtaatcgagaatatctacagattaagaggagagggatattcggtaaagaaggcggctgttgagggcgcaaatcaggtggcaggagccatttttgcctctacactcaccacggtaagtgtgtacgcaccaatcatttttactgatggaatcacgagacagctctttgtagatttggctcttactgtagcatttacacttatggcatctcttgtagttgcactcacatttgtaccggcaattgcttcaggcatgctcaaaaagacgaaggatataaagcatccatggtttgaccgttttaaggattggtatggaaatgtgctcggcacatgtcttagatttaagccggtggtttttattgcggcagtagtgcttttagtcggcagtggcgcactttgcatgtcaaggggaatgacatttatggatatggacatggagtcaaatcagatttcacttaccatagaggcaaaggatgacgaaaagcttgacttcaagcagcttacagagctgtctgataaggtcatggacaaaatctctgatataaagggaatagacacaataggagctacagcaggcggcagctcgaccatgaacctgatgagctcaggaagcgacagcgtgagcatgtatatattgcttgatgagaagtcggatgtttcatcggataaggtaatagatgaaattgaaaaacgcacaaagaatctggactgcaaggtaacagcatcttcgcaggctatggactcatcagagtttttcggaagtggtctctctgtcaggattaagggtaatgatatagacaagctgcagaagcttgcaggtgatgtggcagatatccttaaggacacaaagggcgtgacagatatagatgacggtcttggagatacaatcaatgagcttaagataactgtggataaggaaaaagcagcaaagtatggctatacggtggctcaggtataccagctcgtatccggtgagatatcatctcaaaagagcgcaacaaccattacgactgacataaaggactatgaggtatacttacaatccgcagagcagtctgatgtgactgtggacgacatcaaaaaccttacatttacctataaggataatgatggcagtgaaaaggagattccgctcagtgatatctgcactatttcgcaggaacagacactaagtaccattcatcgagatgctcagacaagatatattacagtatcaggtgcggttgatgaaaaccataatgtaacattactaagcaataaaattaaatcgaaaattaataaacttagcattcctgatggctattcaatagacatggagggcgaggatgagacaataaatgagtcaatgagtcagcttgtacttatgcttgtgcttgcagtgatatttatctatcttatcatggtggcgcagttccagtcattgctttcaccgtttattatcatgttctgtatacctcttgcgtttacaggaggctttatagctcttttcatcacgggaaatgagctcggaatcatatcaatgcttggctttatcatgctggcaggtctcattgtaaataatggaatcgtgctcattgattacatcaatcaggccaggagagagggcatgagcaagcatgaggcaatcatagacgcaggccgtacaaggcttcgtccaatactgatgacagcgatgaccaccatacttgcaatgtttacatcggcgataggtatcggagatggctcagatatgattaggccgatggcaattgcaataataggaggtctcgtatacggaaccatccttacgcttatagtaattccatgtatctatgatgcgttcaacagagagaagagcatggtagaggaagaactgtagcaaggtagaagaaaaaagctggaaatatagagagttggaggatttttacatggcaaagtatattatggcattagatgcgggcacgaccagcaacagatgtatacttttcaatgagaagggcgagatgtgcagtgtggcacagaaggaatttacgcagttttttccaaagccgggctgggtggagcatgatgcagaggaaatctgggccacacagcttgaggtggcaaaggaggctatggccaatattcaggctacggcagccgacatatgtgcgataggcattactaaccagagagagaccacaattgtatgggacaaaaatacaggtgagccggtttatcacgcgatagtatggcagtgcaggcgcacggcagagtatgcggattcactgaaggaaaaggggcttaccgggaccttcagaaaaaagacaggtcttgtgatagatgcttatttttcggcaactaagctcaagtggctccttgacaatgtgccgggagcaagggagagagccgaaagaggtgagcttttgtttggaacagtcgagacatggcttatatggaagctcactcagggacaggtgcatgtcacggattattccaatgcttcaagaaccatgatgtttaatatcaataccttaaagtgggatgatgagatacttaaggagcttgatataccaaagagcatgcttccaaagccaatgccgtcaagctgtgtatatggtgaggtgaatcctgtgtttttcgggggtccgattcctatcgcaggagcggcaggagaccagcaggctgcgctttttggccagacctgctttagggcaggagaagccaaaaatacatacggtaccggttgcttccttctcatgaacacaggtgagatgcctgtttcgtcaaagaacggacttgttaccactatagcctggggcatagacggcaaggtggtatatgcgctggagggatcaatatttgtggcaggagcctctatccagtggctacgcgatgagatgaaatttatcgattcttcaacagattcagaatacatggcgagaaaggtaaaagacacaaacggctgctacgtggtgccggcatttacagggcttggagcaccgtactgggaccagtatgccagaggaaccattgtggggcttacgagaggtgtaaacaagtaccatgtcataagggcaactctggaatcaatggcatttcaggtaaatgatgtgcttgaagcaatgaaggctgattcgggcatcaatctcacatcacttaaggtggacggcggtgccagtgccaataatctgctcatgcagatgcaggctgatatcagcaatgcaccggtcaacaggcctgtgtgcgtggagacaacagccatgggcgcagcgtacctcgcagggcttgcagtgggctactgggaaagcatggatgatataaagaaaaactgggctattgaccgtgtgtttgagccggagatagcggctgatttgagagaaaagaagcttaaaatgtggaaaaaggctgtcgcctgcgcatttaactgggcgaaggatgaataatagctgatgcttgaattgttttaaatgagcttagtgatacggcaattaaacaatgtatggaaattggtaggagaaaataacatgtatgatgtagtaattataggagcgggagtatcgggaagcgcctgtgccagagagctttcgaaatataacctgtccatctgtgtggtggaaaaggaggaggacgtgtgctgtggcacctcaaaggcaaacagtgctattgtccattccggaattgattgtaagaccggtacacttatggcacagatgaatatccgtggaaatgagatgatggacgagctttcgaagcagcttgattttgagtttagaagaaacggctcactgatagtgtgctttagcgatgacgatatgccaaggcttaaggagctttacaatcagggaatcgcaaatggcgtgccgggacttgaaattcttgattcaaagaaagcacatgagatggagcagaatctgtctgatgaggtggtggcagctatttactgcccgacaggaggcattgtatgtccgtttggcatgaatatcgcatttgctgagaatgcggcagcaaacggtgtggagttcttatttaatacagaggtgaaggcaatacaaaaggagcagacaggctatattctcatcactcaaaatggcgaaattcatgcacgctgcattgtaaatgcagcaggtgtgtatgctgatgtgtttcacaacatggtgagtgaaaacaaaatccatatcacaccaaggcgcggagagtacgagcttttagacagagctgcgggaggtatcgttgacaagactattttccagctcccgggtaaatacggcaaaggtgtgcttgtaaccccgacagtacacggaaatatcctaatcggacctacagcagatgaccatgaggacaaggatggtacaaatacaacgagagcaggcttagagcatgttgtgacatccggcacacgttcggtgccgtcacttcctatgcgtcaggtcataacctcgtttgcaggaaaccgtgcacatgaggacggacatgagtttatcatcgaggagctttctgacgcaccgtattttattgactgcgcaggtatagagtcaccgggcttatcaagtgcgccggctatcggtgagagagtggcagcaatagttgatgggctttttaatccctctaaaaatgcggatttcatcgagacaagaaaaggtattttaaatccaaagaagctttcagaggatgagtataaaaagctgataaaagaaaagcctgagtatggcaatataatctgccgctgtgagatgattacggagggcgagataatggatgcggtaaacagaccacttggcgcaaagtcacttgatggtgtgaagagacgcaccagagccggaatgggcagatgtcaggcgggcttttgttctccgagaactatggagattatcgccagagagaagggaatttcgcagcttgacgtcactaaaagcggtggaaagtcaaagatagttgttggaatgagcaagaatcgcggatagtctgtcttacttcaaagagacaggtaacgaaagattgatattgggttaatatcagattaacataggggggacaatatggagttttatgatattgtgatagtaggaggcggcccggcaggtcttgcggcagcagcttccgctaagaaaaataaaatagataaaatacttatactggagagagactgtgagcttggcggcatattaaaccagtgtatacacaacggctttggcctgcacacctttaaggaggaactcacaggccctgaatatgccggaagatttatcaaagaggtcaaagagcttggcatagagtacagactgaatacgatggtcatggatatctcaaccggtgacgagttcaaaaacggggcagatgacaggcatgatgtaaagataaaagatgaggcaaacgataaaatagttacagctatgaaccgcacagacggacttttccatatcgctgcaaagacagtaatacttgcgatgggctgcagagagagagcaagaggtgccctaaacataccaggctacagaccggcaggaattttctcggcgggtacagctcagagactggtgaatatagagggatacatgccgggacgaaaggtagtaatacttggctcaggagatatcggtcttatcatggcaagaagaatgaccttggagggtgccaaggtgcaggtggttgcagaactcatgccgtattcaggaggcttgaagcgtaatattgtgcagtgccttgatgattttaatatcccgcttaagctcagccacacagtggttgatataaagggcagggagcgtgtggagggcatcactctcgctcaggttgacgagcataacaagcctattgagggaacagaggagttttacgagtgcgatacgcttttactctcatgcggactcattccggaaaatgagatttcaaaaacagcaggtgtagagctcaatcctgtaacaagcggacctgttgtaaacgaaagccttgagaccaatgtgccgggtgtatttgcctgtggaaatgtgcttcatgtgcacgacctcgtggattatgtgtcagaggaagcaacagcagcaggccgccatgccgcagagtatgtaaaaaatggcggtgataagagttgcgatggcaaagaaatatcgataaccgctacaggcggagtacgatacactgttccaagtattataaatactgcacaaatggatgatactgtgacggtaaggtttcgagtgggagctgtgtataagaattgttatattgcggtatatctggatgataaacaattacagcaccgcaagcgccctgtagtggcaccgggtgagatggagcaggtggtgcttgagaagaagcagctcatcgaaacggaaaatccccgcacaattacgataaagattgaggaggcatagtatcatggaagaaagaaatttgacatgtataggctgccctctgggctgtgcccttaaggtgacaatagatggagaaaatgtcacagtaaccggaaatacctgtaagcgcggagcagactacggagcaaaggaagtgacgcatccgacacgaattgtgacaagcacagtctgtgtgaaaaatggcacaataccgatggtatccgtaaagacggcacaggatattccaaaggaaaagataatggatgtgatggagtgtatcaaccaaatcacggtagaggcaccggtgcatataggtgatgtactgctaagcgatgttgcagcaaccggtgtggatatagtcgcaactaagaatgttgtgcaaaaatcatattgacaaatcacccaatgcactttaatattgtagaaagaaacaggcaaaatatttaaaggcataagaaagaggagtacatgacgaaagctttcagagagagcatccggtccgtaagatggtgatacattttgggcaggctgaaaggtgcttaagacagaaatcatggaaggtagcttttgagccgaagaacccagaaagttaaatctatatataacaagatttgacataagttcttccgattcgtccacgttacaggacaagaggcattcgagtttatatgtatatatatgctccgatgtaaacgaaggtggtacagcgctaattcgcccttccggtcagtgatcgggagggcgtttttatgtacccataccggaagattgcgcatgcaatccaatcggtcgcccgtagtaaataaaaagaaaaacagcaaaacatcccaaagcttttgcgtcattcatataaaaggaggaaaacatgagcaaagaactaaacaaaacctacgatccaaaggacatcgaggaccgtctttacaaaaagtgggaagacaatggctacttccatgctgaggtagaccgcagcaaaaaaccattcacaatcgtgatgccaccaccaaacatcacaggacagctgcacatgggacatgcccttgacaacaccatgcaggatatccttatcagatacaagagaatgcagggctacaatgcactctggcagccgggaacagaccacgcatccatcgcaacagaggtaaaggtcatccaggcacttaaagagcagggaatcaacaaggcagaccttacaagagaagagttcctcgagaaatgctgggactggagaaaagagtacggcggacgtatcgtaaagcagcttcgtaagcttggatcatcagcagactggcagcgtgagagatttaccatggatgagggctgctcacacgcagtacaggaggtatttacaaagctttataagaagggctggatttataagggctcaagaatcgtaaactggtgtccggtatgtaagacatctatttcagatgcagaggtagagcatgaggagcaggacggcttcttctggcacattaactatcctgtagttggcgaggaaggcagatttgtagagatagcaacaacacgtcctgagacacttttcggagatacagcagtagctgtaaaccctgatgatgagcgttatcaggatatcatcggaaagaccttaaagcttccatgcacagacagagagattcctgtaatcgcagattcatacgtagataaagagtttggaacaggctgtgtaaagattacacctgcacacgaccctaacgatttcgaggtaggaaaacgccacagcttagaggaaatcgttgtaatcaatgatgatgccacaatgaatgaaaaggccggaaaatatgccggaatggacagatacgagtgcagaaaggcactggttgaggatcttaaggagcagggacttttggtaaaggttgtaccacactcacacaatgtaggtgtgcatgaccgctgtcacacaacagttgagccaatgatcaagcagcagtggttcgtcaagatggacgagatgatcaagcctgcagttgagggagtaaagaacggagaaatcaagcttcttccttcaagaatggacaagacatacttcaactggacagacaatatccgcgactggtgcatcagccgtcagctctggtggggacacagaatacctgcatggtactgtgatgactgtggagagatggtagtttcaatagaaaagcctggcaaatgtcctaagtgtggcaaggagcattggacacaggatcctgatacacttgatacatggttctcatcagcgctctggccattctcaacactcggctggcctgaaaagacagaggatcttgactatttctatccaaacgatgtgctcgtaacaggctacgatatcattttcttctgggtaatcagaatgattttctcaggctatgagcagatgggcaaggcaccattccacacagtgcttttccacggactcgtaagagattctcagggccgcaagatgagtaaatcactcggaaacggaattgatccgcttgaggttatcgacaagtatggtgcagatgcgcttcgtctgacacttatcacaggaaatgcaccgggaaatgatatgcgtttttactgggagagagttgaggcttcaagaaatttcgccaacaaggtatggaatgcatcaagatttatcatgatgaaccttgaaggtgtagagcttagagagccaaagcttgatgagcttcatgcagcagacaagtggattctttcaagggtaaatactcttgcaaaggatgccacagaaaacatggacaagttcgagcttggaatcgcagtacaaaaggtatacgacttcatctgggatgagttctgtgactggtatatcgagattgcaaaggttcgtacctacaagaaggatgaaaacccagagtcagcaaatgcagcactttggacgcttaagacagtacttgtaaatgcactgaagctccttcatccatatatgccgtttatcacagaggaaatcttctgcacacttcagtcagacgaggagactatcatgctctctaaatggcctgagtacaaggaagagtggaatttcccggcagaggaagccgcaatcgagcactgcaaggatctcgtaaagggtatcagaaatgtccgtacacagatggatgttccaccttcaagaaaggcaaagcttttcatcacaagtgatgatgagtcagtcagaaagatattcgaggacaacaaggaggtatatgtaaatcttgcatttaccagcgagattacagtacagcagggcaaggccggtattggagatgacgctgtatcagtagtgatacctgatgcggttgcatacctgccgcttgaggaccttgttgatttcgagaaggaaaaggaaagactcaataaagaaaaggataagcttacaaaggagcttgcgcgctcaaggggcatgctctcaaatgagaaattcttaaacaatgcaaagcctgaaaaggttcaggaggaaaaggacaagcttgcaaagtatgagcagatgatggctcaggtagaggaacgtctggctcagtttaaataattaaatacagattatatttggtgaacactgttttcctggggcaaggatgcaaaggaggccgtccacaatgcggtggttcttgaatagaatagaacaaagaaagaatatggagataaaacagaaaggaataaacaatgaatgtaaatcctataacaagattggattatccagatctggatgtgatccgcgtagaagacacctattatatggtatccacaaccatgcactttatgccgggctgtgagattctgcagtcttttgatctggtgcactgggagcatgcgacttatgtctatgagacgttggatcatacggatgcgcagcaactgaaaagcggtcagaatatttacggacagggcatgtgggcagcttccctgcgctatcatgaaggccgattttatatctgctttgtggcaaatgatacccgtaagacttatttgtatacttcggaaaaaatagatggtccatggaaaaagcaactgatagaaggcttttatcatgacggctctttattatttgatgaggatggcagaaactatattgtatatggaaatgatgaaatctggattacagaattgaatgaagatttgactgcaccaaagaaggacggattacatcgtcttttagtcagtgatcataagaacccgaagctaggctatgagggttctcatattcaaaaaataaacggctattattatatttttctgattcattccctgagagaccgctggatgcggacggaagcatgcttttacagtgattctctggaaggagaattcacgggtggagatgtactttgtgatgatcgtggatattgtggacagggcgtggcacagggaggaatagtggatacgccggatggaaagtggtatgcaatgctgtttcaggattccggagcagttggacggcttcctattctgcttccggttacctggaaggatcattttccggtttttggacagaacggacatgtgccggaagaaatagaggttcacagtaccagaccaggatatatttatcagccattagtgggaagtgatgatttctgtaatggactgcttccgcgctggcagtttaatcatgatccagatccacagtactatcatctggatgcattgcagggaacctatacaattacaacacgggaagtttgtacagagcttacacaggcagtaaatacgcttacgcaaaggatgagttatccgtcctgcgcagctgaggttactgttgatgcttctgcattgaaagagggcgatgtcgcaggtttgtgtgcgtttcagggctgttatgctgcagttggcattacaaaacatcatggaaaatatgaagtccttatgctggataaaaaagaagatggtatattggatatgacggaaggaactgttgttgaatcacaccagatggattttcgtcttgaagcagatttctgtaacatgaaggatgaagcacgctgctattaccgggtaaataagggagactggctacccatcggaaccgtgcataagctgtacttcaaactggatcattttactggttgccggtttggtctgttctgctatgcggcagaggaaacaggaggaagtgcctgcttccgggattttaagtattatgatgttgatgaaatctcataaagatagaactgcataaaataagtgtcggaatttactcaaatttttcctactttggacattggcttttacaacggtattgtatagtgaagcagaggaaaaacaaaacatgtttcagagaggagaaatttgacaagattgagttcaaggagcaggacaaggcagtcgtgatgctgtcgatgaaataaaaaaattgcgatatttttattaaatcttaatggaaatatacttgcataaaggggttactttattataatatatagtgacccttttttgatgggattatttagcaggtaattatggaggcaggattatgataaattttgatgaagaaataaagaactatgagccaagtctagaaatagaggaggctgaatctgcgatttacagccacgatctgacagatgtcacagatatcattgcacagttattacgtgagcaggacaaaaggcagggtgaattaagatgatttgttataaatgcggacaagatgcaggctggaacgataaatgccctgtatgcggggctgatctttcactttttaaaagagctatcagaatatccaactcatactacaatgatggtttacaaaaggcacaggtgagaaatctgtctggagcgattatctctctcaggcagagtcttaagttttataagtacaatatccaggcaaggaatctgttaggtctcatatactatgagatgggtgagatggttgacgccttaagtgagtgggtcatcagtgcaaactatcagcctgatgataatctggcaaagaagtatatagatcagattcataataacagaaatcagctcgaaacaatcaatcagactattaaaaaatataatcaggctttaacttattgcaagcaggacagtaaggaccttgcggttatacagcttcgaaaggtgttatccttaaatccaaagcttgtaaagggacatcagcttttggctcttttatatctggaggagggacacctggataaggcaaagaaagccttacgcgatgcgggcaagatagatacagacaataccactaccctcagatacttaaaagaagtgaacagacgtctcaaggaaaaaggatctgagaggaaaaagaaaaatgatgatttaatttcctaccagagtggaaacgaaacaatcattatgccaaagcgattcagggagagctcaatgtgggcaaatatactctatgttataatcggtctggtagtcggagtggcggttacgtgcttccttgtggttccgggcataaaaagccaggcgaaaacagatgcaaagaagcagctattatcggccaatgatacgatttccacaaatgggcagaccatcagtggacttaatgatcagatagacaagctaaagaaggagcttgaggacgagaagaagaaaaatgatggagtatcagaccagatttccacatatgaggctttgctcaatgcctatgtatactatacatccaatgatgtaataaaggcaggagaagcacttgaaaatatcaacacaagctacctgagtgactcggctaagcagacatataatacgctcaatggttcaattgcagattcatataaggaagcactgtacagtcaggcatactcatcatacagcagtggcgattatcagagtgcaatccctacattccagaagcttgtcggcttggatgaggcatacagggatggttcagctgcatattacctggcgcagtcgttcagaaagtcaggtgacttagcatctgcaaagccatattatcagtatgtggtagacaactacgcaggcactgagaaggccagaacatcaaagaattatctagcacaggaacagtagtaaaacaactgctgcgaggcaataattaaatatagaattacgaaagacaccagataatctccggtgtcttttttatatgagcaggaaaggaagagtttgacatgatagaaaattatatcaaggaagcagaccgggtgacataccttatgccaaaggaggtggatcaccactgcgcagggcagataatcgcagagcttgatgcacttatagagggctgtggtgtcagaaaaatagtatttgacatgaaacagacagaatttatggacagctccggcattggagtgataataggaagaacaaagaagcttaagtactttaatgacagctcggtgtcggtttgcaatatgtcggacagagtggacaagcttttgaaatgtgccggcatttacactattgtacataagctttaaaactgaattaaattaaaatataatcagacagaaagggagcataatgaacgcagcaaaaacaaatcatatatcgcttagctttgatgcaatttcagagaatgaggcatttgcgagaatgacagcagccatgtttatggcacaattaaaccccacactagatgacgtggaggacgtaaagacagcagtgtcagaggcggtgacaaacgcaattatccatggctatgagatgggggatgacaatatttcatccggtcaggcagattatcaagcagcagaagaaaaaagttgtccacaggtacatatgaattgcagctacataggcagggagctttacatagaaatatcagatagcggagtaggcatacaggatgtggcaaaagcaatggaaccgttatacacatccaaaccacagcttgacagatcaggcatgggtttttcattcatggaagcatttatggacgcactaacagttacatcagaaccgggacacggaacaacagtaaagatgaaaaaagtactatgaagagtgacaaaatcagcagacttgtcacagaaaatataaacctgatttatttagttatgaaacgctttagaaacagaggcgttgaccaggaggatttatttcagataggagcagttgggctgacaaaggcagcgcagcgatttgatgaaagtaagggctttgccttttctacatacgcagtaccattgataataggggaaatacagcgctttctacgtgatgatggaatggtacatatcagtcgaaaaatacgggatgatgcaagaaaaattgcaattatcagagaaaaatacagaatgaatgaaaatagtgaaatatcacttgaaaaaatggaaattatttccggtatgtcaaaacaggatataataattgccatggaagccgataaaaatgcatcgtcaatagaaaatgaaagtgtgcttgattatttggacaataaaatgagtgcagaagcatcagacaagccatcggacacagataaagtgataaatcacatcgcaatgcagcaggcgtttaactcactggatgatagcgagcgcagactgattatgctccgctatatgcaggataagacacagaagcaggtggcagaagtgcttggacgcaaccaggtggccatatcacgaatggagaagaatacattggcgaagcttcgcagggcaatgatgtgagtgggaagcgtcgtaggttttgagcttcccacataaaggctgagaggatgccggaggtggcatgtagtatattcttcagaaaattatgaagtcagccccgagcccatgtgcggatagattgtggatatgccggttttttttgttattagggaatatggaacctcgtggcagttcataattttcttcagaacacactgcatgccctccggcgaatttagttgtgttgagtgggaagcagtggagcttttgagcttcccacgtactattgaaactattgaaattattgaaaaaagaaaactacttgcacccaagccacaaagcatattacaatgggcgataaggaatataattggattgtcgaaaggagaaaagaatgaaacttccactcacatatgataactatatattcgacctctacggtacgctcgtggatattcacacagacgagagtgacactgcaatctgggaaaagctcgccatgttctatggctattacggagctctgtatgaggcaaaggagcttaaggagcgctatgagacacttgtaaagagcagcgaagcagagctgaaaaagaaaattgaaaagtctgatgcagatgtgcagtttgctatctcatatgcccatgaagcatcaccggagatacatatagaggatgtatttgaaaagctttatgaggaaaagagtgtgaatccgacaaaggagctttcagtgcatacaggccagtttttcagggtgatgagcaccgaatacataaagctttatccgggtacaaaggagatgcttaaggaacttaagaaggcgggaaagaatatatatctgctttcaaatgcgcagcgtatatttacagcctatgagatgagaagacttgatatctttgatttgtttgatgacgtatttatctcatctgattataataccaaaaagcctgatatcagattttataaggagatgataaataagcatgatattgacgtatcaaaatcgctttttataggaaatgattcgactaccgatatcaagggggcaaaggaatgcctgatggatgcattttatgtgagatcgaatatttcaccaaaggatgatatggctcatgatgcagactatattatagataattttaccaactggtaatgcattattgtttataaaaatgtgaatattatataaaaaacatatataaattaaaatttttctataaacagttgcaaataaaaaataatggtgtaaaatgaactagatttgaattagtttattttttaacaaagtagaggtgaaaagaatgtcaaacacattattaatgttgtgtatcccatttgcgggcttattactgtgcatagcagttatgccgcttgtgaagcctgaatggtgggagaagcatcaagctcatgcagttatcttatggtcactgctttttgccattccgttcgcgctgttctatggagcaccaaaagccgtagagacggtactggagtgtatgataggcgactatctgacctttatcgtgctgctctttggactgttctgcgtagccggaaatatcaagctggagggaagtctggtcggcaacccaaaggtaaacgttatcatgcttgctgttggaactcttttttcaagctgtataggaactacaggagccagtatgctttttgtaaggccgattattcagatgaactcatggagaaaaaacaagcgtcacatcatggtatttttcatttttcttgtgtcaaatatcggaggatgtcttacacctatcggagatccgccactgctcatgggattttcaagaggagtatcgttcttctggagcatgaggctgtttccggttctcgtaataaatatgatactgcttctttccatattttatcatttggacaagaaggcataccagaaggatatcactaagggacttatgcctgaggtgagggaaaatgagcctctcatcaggataaagggtgcccacaactttttatatatcgtaatgattgtcatagctgttatactaagcggtgtgcttcctaagctttctgcattccagaatgctgcaggagaggttatcggtattccgatattcagggaggttacactcactgtgcctgcaattattgagattgctattattctgcttgcagccctgctttcctttaagacaacaccgaaggaggttcgtgtgcagaaccatttcacatggggagcaattcaggaggttgcggtgcttttcatcggaatcttcatcaccatgcagcctgctcttatggtattaaagagtgcaggttcaggtcttggaatcacaaagccgtttgagatgttctgggcaacaggagcactttcaagcttccttgacaatacaccgacatatctggttttcctgactacagcgggtgccatgcactttactacaggtgttgcaaccacactgggagtggtgccggtcaagatgcttatggcaatttcgtgtggcgctgtatttatgggagccaacacatatattggaaatgcaccgaactttatggtcaagtcattatcagacgaaaacggtatcaacatgccatcgttctttggttacatgtggtggtcattgcgttatctgatacctgttttcatcatagatatgatcatattctttttataggagggatgaattatggaattttatgacgagaaaattaaagctcttgccatcgaaatctatgagcttgatgccgaagtatacaagaaattaggctcatccctcggcagggtatttggtggcgagaaggatatatgtatccgtaacatcatggaggatctgcactcaaggcagaacagctcaagaatccgaagcgagcttgccctgataagcaacatggcaagaacaatacctgatcatgatacaaggcatgatatcatggtcagatacaacaacatagtagaggaaatagcggagctcccgacaggctttgctgacggagatatcctcgatccaaagatagcggatttaaataccgtaaaccttaaggatcgtttcaagacgggcgatcatctgattatctgtataggacgttcctgcggatgtggtggaaatgagattggatttgcacttgcagacaagcttcgtatgaatttctatgatgtgtctgtcatgaatgaggtgttcagacagaaggatggagaggaagcagcccaggctacagctaccttccagaaaaaagagcgaatgggaatcaaaaagcgcataaaagcttttaagaaataccacggactttcatcagaggatgtgcttttctttgatacaagcaagttccttgtagagaaggcaaagcaggaggacttcattgttatgggacgttttgcagatgcgattctgacaaacaatcatattcctcacataagtatttttatcacagcaccggagaagagaagagtccagcgtttccttgagataaataagaatgtgactccgaaccaggcaaagaaatggatagaatctgaggataagagacatttgaagacctacaaattctataccggcagaaagtggagcaaggcaagtaactatgatatctgtatcaacagtgcaagctacggtatcaagggctcaatagagcttatcatacgtatgcttcagctcgatgaccgcgtgaagcagctgattgagtaattttttaaagcgtgttttattgacgtaaaacacgcttttttgatatatttggcatttctgaaaaattcctcttacaaaattcgtgaaaaagtgataaaataatattgtataacgaaagaggtgtgatatgttcgaaataggtgattacgtattaaatgctacaaatggaatttgtaaaataagcgaaatcgtggagttagacatgtcaggagacaagaagctcaagtcatattttttactccgccctgttgaggaggagaatgacagagtgtatatacctgtcgacaatgctgataagaggatacgtaaggtaataacacaggatgaggcacaggcggtgcttgatagagtacctgagatagaggcactcgtggtaaacaatgagaaggagcgtgaaacgctctataaggaggcagtcagaagctgtgagccggataatgtggtcagtctcttaaagtgtttacatatcagaaatgagcagcgtgcgcaggcaggcaagaaggctacatccgtcgatgagcgctatggcaagatggcagagcacaatttaaatgcagagcttgcatttgttcttgaaaaggacaagcaggagattaaagatataattcatgatatgctatagtatgcgggcagaatcagaaagcgggttctgccttgttttttgctaaaaataagagatattaagaaaagtttaaacaaataattaatgagtttatgttattatatatcaggtatgggcatataatattaccgtttaatggtaaatgagaaaacttatcatgttctatctgataaaaacaaaagattgaaagtaagggaatcaatatgaataatatgaataatatgaatattaattctgcaatggcagatactctggatatagggaatacagacacagagaaaaagacagggctcataggcttttataattatacggtagtgcttacatacataggcatgtggataggcttccttggagttatgcttgccataaaggataggtatgtggggtcactaatctgccttatgctggccggtgtctgtgatatgtttgacggcaccattgcatccacaaagaaggaccgtaccagggacgagcgaacatttggcatacagatagattcgttaagtgatatcatatgcttcggcgtgcttccggcagtgtgggtattttgtgtgactccaaagatttcaatagcatttaccgccatatttgtattcattctttgcgggcttatccgtctggcatactttaatgtggatgaggccaacaggcaggcagcgacagcagagcgcagacagtattatctggggcttccaatcacctcaagtgcgcttgctatcccggcggtatatctgattggagagttcacagctatacatacacagacaatcgcggcacttgcccttttaatcattggcatttgctacgtgctccctgtaaagctcaaaaagccatctctttttggagaggttctgcttgtaggtataggagcagttgagttttgtattctcattgcggaggttcttatttaatggcaaaaaaatcgtttgtagactggctttataccactgcaccggggcgtatgacacttaaggtgcttctgtatacaggcgcacttaagcttggtgaaatggtcgcgcgctcccagttgtctaagccgtttatcagccggtatataaagaataacaatataaacatgtctgattttaaggggcagaaatataacagctttcaggactttttctccagaaagcgcgatgatattgaggtggacaggcaggctgagcatcttatcagtccgtgtgacggctacctgagtgcatacaggataaaaagcaacaacagctttcatatcaagggctcatggtacaaggtgacggaccttgtcaccgacaaaaaaattgcaaaggaatttgttggaggagactgcgtgatactgcgtctttgtgccaacgattatcatcattactgctatatagatgatggatttcagggcaggaatcattttgtgaagggactgcttcacagtgtacagcctattgcactggaaaatgcgcctgtatacaggcaaaacaggcgtatgtggactattttagatacagttaattttggcaaggtggcacagattgagataggtgcgctgcttgtgggaggcatagtcaatgaccacgagaatgtcatgatgagaaagggcgcagagatggggcactttgagctgattggctccacaatagtgcttttgtttaaaaaaggtaatattgacctgcttccggaaattaaagagtgtataaaaggagacaaagaagtacgtgttatccagggacagcatatcgcaaacaggacagctttttaacagaatacttccaaaatacagtcgtattccgctgctttttacagtagtgctcaatttcagtgtatactggggcgcgcgtgctattgcaggcggttttatccatcacaatatagagacctcgcttgatgatatgataccggttgtgtaccctacagtagtcatttattttggctgctatattttttggattataggatatctgtacaatgcagcgatggataaaaggcactgttatcgttttctcatggcagactggctggcaaaggtagtctgttttatctgttatgttgtgtatcctacaaccaacacccgcccggaaatagtgggctcagacatatgggcacagctcatgcgctttttatatagtatggatgcggcggacaatctttttccatctatacactgcctcgtaagctggctgtgctatattggtatccgcggcaataaaaaagtaccgcagtggatacgtacaactttctgtatttgcgctatagcagtattcatatccacattgactacgaagcagcatgtgatatatgatgtagttgcaggagtgctcctcatcgaagtaacataccgaatttcacggctgttacttactaaattaagtaaataattaattggaatgcagcttcccactcgtaaaccttctgccggagagtatactgcatgctatgccggcttgcatagattataaagtgggaagcggaaatatattatatgtaaggggggtaaacatggatgatacacaaatagagatgctgccgatgttgggcgaattcagttcaattgcctcgcagtatgaacacatcatgttctactacgaatcgggtatacagcagatagtagcaaagctacagatattaaataatgaattcaaaaacaatcacgaaagaaatccaatcgagaacataaagagccgtgtaaagtcacttgacagtataatagataagatgaagcgaaagggcattccgctcaccaccaatgccatgaagcgtgaaattaaggatatagcaggcgtcagggtcatttgtccatttatatccgatgtatatcaggtggccaatatgcttgtgaatcaggcggatgtcgagattgtcacaataaaggactacataaaaaaaccgaaggagaatggttacaggagtcttcatatgatagtgctggttgatgtgtatttttcggatcacaaggacaaggtgccgatagagatacagtttcgtaccattgccatgaatttctgggccagcacagagcatcagcttcgctacaagaagagccgtgtattcacggaggagatgcagcaggagcttaagaaatgcgcagatatcatggctgacgctgatgacaagatgcagaatctggcaaatgtttcggggattgtgcagccgattgagtaaaagagagtgatgtaaatcactcttttttgcttgtaaatcaaaagtttatatttatttaataaaaattgttagcactctcacttgacgagtgctaatttgcgtgctataacatagtcacaaggaatattgaagaattatttaaaggattatttagagataaaattttgatattacctgtatgacacataagaatcatatttatggataacatagtagaagggagtgagactatgaacattcaaaaatttacacagaaatcaatagaggcagtcaatgactgcgagaagcttgcatatgattatggcaatcaggagatagaacaggagcacctgcttgtggcattactttcacaggaggatggactgataccgaagctgattgataagatggagataaacgtagagcatttcacggagaatgcaaagcgccatctggcagcgcgcacaaaggtaagcggcagcagtgcacaggtctatgtgggcaatgatctgaacaaggtccttatccatgctgaggacgaggcaaaggcaatgggagatgagtatgtttcggtagagcatcttttcctatgtttgctgaagtatccaaacaaggcaatgaaggagctgattaaggagtacggtctcacaagagacagattcctcacagcgctttctacggtcaggggcaatcagaaggtcacatccgataaccctgaggccacatatgatacacttgagaaatacggctacgacatggtggagcgtgcaagacagcagaagcttgatcctgttataggccgtgacgatgagatacgaaatgtagtgcgtatcctctcgcgtaagactaaaaataacccggtacttatcggtgagccgggtgttggtaaaacggcagtcgttgagggactggcacagcgtatcgtaaaaggcgatgtgcctgaaggcttaaaggacaaaaaactgtttgcactcgatatgggctcactgattgcaggagccaagtacaggggcgagtttgaggagagacttaaggcagtgcttgaggaggtaaaagcctctgacggacagataattctatttatcgatgagcttcatacaattgtcggagcaggaaagacagacggagccatggatgcaggacagcttcttaagccaatgcttgcaagaggtgagctgcactgcgtaggtgccaccacactcgatgagtaccgtgagtacattgagaaggatgcagccgttgagagacgtttccagcctgttatggtagacgagccgacagtagaggacactatctcaatacttcgtggccttaaggacagatacgaggtattccacggcgttaaaatcacagactcggcacttgtcacagcggcagtgctttcaaacagatacatcacagacagatttttgcctgataaggcaatagaccttgtggatgaggcatgcgccatgataaagacggagcttgattcaatgccggcagagcttgatgagcagaatcgtaagattatgcagcttgagatagaggagacagctctaaagaaagagacagaccacttaagtcaggacaggctcgcagcactacaaaaggagcttgcagagctgcgtgatgactttaatgcaaaaaaggctcagtggcagaacgagaagggcgctgttgacaaggtcagcaagcttcgtgaaaagattgagtccacaaagaatgaaatcaagacagcacagcagaactatgacctggaaaaggcagcagagctgcagtacggcgtgcttccaaatttgcagaaggagctggaatcagaggaggcactgcttaaggacagagacttatcgcttgtacgtgagaacgtgggcgatgaggaaattgcactcattatctcgcgctggacaggaatacctgttgcaaagcttacggagagtgagcgtaataagacacttcacctcgatgaggagctgcacaagagggtaataggacaggatgacggagtcacaaaggtgacagaggctatcatccgttcaaaggcaggcatcaaggatcctacaaagccaataggttcgtttatgttcctcggacctacaggtgtaggtaagacagagcttgcaaaggcacttgcagcaagtctgtttgatgatgaaaacaacatggtcagacttgatatgagtgagtacatggagaaatactcagtgtcacgactcatcggagcgcctcctggatatgtaggctatgatgagggtggacagctcacagaggctgtaaggcgtaagccatactcagtagtgctctttgatgaggtggaaaaagcccatccggatgtattcaacgtgctgcttcaggtgcttgatgacggacgaatcaccgactcacagggacgtaccgtggatttcaaaaacactatcatcattatgacaagtaacctcggctcacaggagcttcttgagggcatagaggcagacggcagcatcagcacagagtgtgagaaccgcgtcatggatgagcttaagggtcatttcagacctgagtttttaaacagacttgatgagattatcatgttcaagcctctcacaaaggacaacatcggtcatatcatcaccctgctcatggcagacttaaacaagcgtcttgtagacaaggaaatcacagtcgagctgacagacactgcaaagcagtttatcaccgacaatggctacgatccggtatacggagcaagaccactcaagagatatctgcagaagcatgtcgagacactcgcggcaaagctgattctggcagatggtgtgagagcaggagataccattcttatagatgtgaaggatggcaagcttagcgcatccgcagtgcagaaaaatgcataagcaaatgcaaatggttaaacagatgcagcataagcaaatgcatgaaaatgaagatgtatttgtaaaacaggcgtagggattttctccgcgcctgttttattttgcgttttggcatggagggaaaacctctgacaaaggagaaaaaatccttctcttttttaattgtgttattatttgaaaaaatatataattaatgtaagcaactagaaaataagtcgaaaattttaataatcaaatgtttgaggtgataagattatgcaaggagaaaagtttacattaatgcaatataatgttaatgcaatattgggctttattgaagcagggcaatttgttattcctgagattcagagaccatttgtatggaaaagagctcaggtaagggatttgattgattctttgtataatggataccctacagggtatattattacatggaagaatccggatgttaagacaaaggatggaacagtagcaaatggaaagcatgtattaattgatggacaacagagaattacagcattgatggcatcaatagcaggtcttgaagtgttagatgaagattttaatagggatagggttaaaatcgcatttaatccgcttgcaaccgattcagataagagatttgcagtacaagatgcatctcatttaaaggataaaaaatggattccagatatttcagaagtatttaaaaatgattttgatccatttgagtttgtccctaagtattgtaataataatttgggtgtgaaacccaatgaagtaaataatgcaattatgaagctgagaggaattgcaaatagacagattggagttatagagcttgatcattctcttgatattgacgaagtaacggaaatatttattcgtattaattctaagggaactgcattaagtcaatctgattttgttatgtccaaaatggctgcagatacggttcatggaggaaatatactgcgtaaggttgttgattatttttgccatttagctgtaaaaccagatttttaccctcaaatgattaaagatttagaatttgaaaaaacagaatttgcatctaaaattaaatggcttgctaaagataatgaggatatttataatcctgattataatgatatgcttcgtgtcgctttcatgtatagttttaatcgtgcaaagctctccgatttagttagcttgctttcaggtagagattttgaaacacgtgagtttaaggaagaaattgtagaagattcatacaataaactttgtgaaggtatcaaagtatttattaatgaacataattttgaacaatttgtattggctattaaaggtgctggatttaaatctagtaagcagctcaattcgcagatgacacttgattttgcatatatgttataccttaaactatcaaaagattcttcaataccacatgatcaagtaaagcatcatgtgcaaaaatggtttgttctttcaacacttacaggaagatatgttggatcgcctgagtctgtaatgagcagggatattagattaataaatgaaaaaggttttattaacttcttttatgagattgaagcatcggttctttcagatacattttgggatatatctttgccacagaatctagagacaacgtcaactaatagcccggcatttaatacgtttcttgcagcacagattaatcttaattgcaattcattatttatgcatggaacaatgatttcagatttaattaatatatcaggagatgtacatcatatatttcctaaggcatatttgaaaaataatggcattgatacaaaggggaggtataatcaggttgcaaattttacgtatcttgatactcaagtgaataaagctataagtgatgatgccccgaatatatattttcaaagtgcattggaacagtgtgacaagaagaacattgcatttggaaatatatttgaaagagatgctcttatgaagaatcttagtgagaatgcaattccagaaagcattgtatcaatgactgtagagaactatgatgatttcttggctgatagaagaaagctgatggcacaattgatgatgagatattacaacggactatagattattctattgttttagtaaataaaacagtaagggagaagaaggtgagattttatggatataaagcaactaattggggaactacagactatgataaaaagattgcacttgagagaaagaacaaccaagtttttatcggtggattgtggttgataaacttatgaaaaatggatataattatattgtaagaaaagtaaggaattcattacttgggaaggaggtttttgtatggaattagcaaaggtaacatcaaaagggcagataacaatacctattgaaattagaaaaaaacttggaattaagaatggcgataagatattgtttgtggaagagtctggaagagtgtatatgatgaattcatctatggatgcacttcgtgaagcacagagatcatttgcaggagaggcagaaagactcggacttaaagacgatgatgatgtaatggaaatgataaaatctcttaggcaggaaagtgtggtgaagtagatgagaattatgcttgataccaatgtattgatatcggcattactttttccggggactaagatggatgcaatgatgaactatatatttactaaccatcagcttgtgttgtcatcttacgttgtagatgagttaaaaaatgtagtcaggagaaagtttcccggaaaagaaatgataatcaacaaattacttatgatgatgagctttgagtatgtttacacacctggtagtatggaaagtggactatttaatatcagagatatcaaagattatccagtactttatacggctattattgaggatgttgatattcttgtgacaggagataaagatttttcagatatagatgtcgagaagccgaaaattatgtctccaacacagtttatggagaattttttagaagaatggtaaaaatgttcggggattataaaaacactcaaaatcagctatacctgatatggtatagctgatttttataaaaattaatataaccacgtttgctttgtagactggcagaatgcagaagagtctttaacaactctttctctttacaatttctgtgcttatttcaatttttacatggcttgcagagatagaatttattatctctgcaagcctttttactgcaatttcacccatgtactgcttaggcacatgcacagtcgaaagaggcggtgtaatgtaggtacacattggcatatcatcaaagcctattactgatatgtcttcagggatacggtagcctgcctctgaaagtgcgcgcatagctccggcagcaatcaggtcattgtcggcaaagtagcatcgggcaagctcgtcaccgctttttattactgccttcatatcgcagtaagcaccgtcaactgtaggggagaggtgatgtacgactgagcgcgaggttgacataccgtttttgcgtattgctttatagaagccgtcggctctctcctcaaagcctgttataatgtatgaggaatgcagatatcccggctgtgcatgtgtttgtttgatcagatagtctgtggcaagataggcaccctgaaggttatttatagtcacgcaatcgaggtttaaggcttcgaaatagttgtctattagcacaacaggcagaccgcaccttgtaaagggctttatgtcatgcttttccatctcggttccaagcagcaggataccctttgctccaagtcttttccactcagatagcaaagcctcaatatcgtcattttcgtatatgtagctgatattcaggtagtagtggcagtgcctgcagcccaaatcaataccctctgacagctgtgaaaagaatggaacatcctgtaccaaaacgccgtgctctgtatgtgtgtaaacaggagaattaggaactacagcgccattctttctgtatattacaaaatataatgtgccattggatgtcggagcttcattggtatttgatattcttgaaaaatcatatccggcagaggtcgcagcttcgagcacacgttttctggtgagtgtgctgacaccgggcttattattaagtgccatcgatatagctgcttcagaaagattaagttgtttggcaagttcttttgctgtgatagacatggcatggctccttatgttttatttgcctcattataacatgacaatatagtattaacattataatttagtaaattaagttgaaaaatacactaaatttactaaattataggtatcaattaagctggaccggatatatacttagcacataagaacaataaatctgtccgatggggcatatgagagaaggagatttacactatgaacaatattccaaaaatgaaaatcggtatagttgcggtaagccgtgactgttttccggaaagtctgtcagtaaacagaagaaaagcacttgtcgatgcatacgctgcaaagtatgatgcagcagacatatacgagtgtcctgtatgtatcgtggagagcgaaatacatatggtacaggcacttgaggacataaaggcagcaggctgcaatgcactttgtgtttaccttggaaactttggaccggagatttcagagactcttcttgcaaagcactttgacggaccaaagatgtttgttgcagcagcagaggagacacaggagaacttaattcagggacgtggagatgcatactgtggtatgttaaacgcaagctacaatctggcactcagaaatataggagcgtatattccggagtatcctgtgggcgatgcagatgactgcgcagatatgatacatgaattcctgccaatagcaagggctatatatggacttaataatcttaagattatttcattcggaccaagaccactcaatttccttgcatgcaatgcgccaatcaagcagctctacaacgtgggtgttgagattgaggaaaattcagagcttgatttgtttgaggcatttaacaagcatgccggtgatgagagaataccggatgtggtaaaggacatggaaagggagcttggcgagggcaacaaaaaacctgagattcttgagaagcttgcacagtatgagctcacacttttagactgggttgatgagcataagggctacagaaagtatgtggcaatcgcaggaaaatgctggcctgccttccagacacagtttggatttgtaccatgctatgtaaacagccgtcttacaggaagaggtatcccggtttcatgcgaggtggacatctatggagtgctcagtgagttcatcggaacatgcgtcagcgaggatgcggtaacacttctcgacatcaacaactcagtgccgaaggatatgtacaaggagtcaatcgagggcagatttgactacaagcatacagacacatttatgggcttccactgtggaaacacctgttcaagcaaggtttgcaacccacagatgaagtatcagatgattatggcaagaagccttcctatagaggtgacaaacggaactctcgagggagatatagtgccgggagatattacattttaccgtctccagtctacagcagactgtaagattcgcgcttatgtggcacagggtgaggtacttcctgttgcaacacgttcattcggcagtatcggagtgtttgcgataaaggagatgggacgtttctaccgtcatgtgcttattgagaagaattatcctcatcacggagctgtagccttcggtcattacggaaaagccctttttgaggtatttaaatatattggcgtgccagttgaggatattaactacaatcagccggcatcactgccatacaagacagaaaatcctttctgttagtgggttctgaatagttacgttatctgatgtaaacatattacgtgaatggagaatagatatgctatatataggtgtggatttaggcacaagtgcagtaaagcttctgctcatggatgagagcggaagggtattaaatatagtctcaaaggagtatccaatcagctttccaaagccgggctggtcagaacagaatccatgtgactggtgggagcagaccgtggctgggcttatagagctgactaaagattttgacaggagcgctgttgcgggaatcagcttcggcggtcagatgcatggacttgtcgtattggatgaaaacgacaatgtaataagacctgctatactttggaatgacggaagaacacagaaggagacagactatttaaataatgtaataggaaaagaaaagctgtctgagctcaccggaaatatagcgtttgccggatttacagcgccaaagattttatggctaaaagcaaatgaaccggaaaactttgccagaataaaaaagcttatgttgccaaaggattatattgcataccgcatgacaggtgtatttagtaccgattattctgatgcatcgggaatgcttcttctggatgtcaaaaataagtgctggtcaaaggagatgcttgacatatgcgatgtaagagaggagtggcttcctgggctttatgagagcagtgaaaagacaggtactctgaaagctgatgtggcatgtgagcttggctttcctaaagactgcatagttgcagccggggcaggagataatgcggctgcagctataggcacaggtacggtcggagccggaaagtgcaacctctctcttggaacaagcggcacacttttcattacaagtgatgagttcagagtggattcgcacaatgcgcttcattcgtttgatcatgctgacggcggctatcatctgatgggctgcatgctctcggctgcaagctgcaacaactggtggatgaaggatatccttcattccgatgactttgtgaatgagcagaagcctcttgaggaggatggcagacttggtgagaatcatgtgtattttctgccttatctgatgggagagcgctctccgcacaatgatccgtctgcaagggcagcgtttatcgggatgagcatggatactgacagagcagacatgctgcaggctgtgtttgagggtgtggcatatggtctccgagattcacttgaggtggcaaagagccttggtgtggcaccaaaaagcacaacaatctgtggtggcggtgcaaagagtgtgctttggagaaagatagttgcaaacgtcatgaatatgcaggttgacacggtagaggtcgaggaaggaccggcatacggcggtgcaatactggctgcggttgcaaacggctgctttgaaaatgtggaggctgcggcagcggctattgtgagaaagaaggatacaaccatgccaagtccacagcttgtcgaaaaatatgagaagggctatgcaaaatttaagcagttttatcctgcattaaagggcaaatattagtcatttcgtagaaaattaaattttgtgttgtaaagtggtgcaaattcatgtatcttattatagggaaatgaattttgcaccacttttttatgcataattagcacttataaaacacgtaattgccgattatatcaatgcaaaatgaattttttgctaaaagaaattgcaaaatgatataacagatatatcaaatatgcatttcaggcggggatgatatggatttatttgattacatgagagaacagaataaggagacaagcggtcccttagcttctaggatgcgtccgacaacacttgatgaggtggtcgggcagcagcacatagttgggaaggacaagcttttgtatcgtgcgattaaagccgataagctcagctccatcatcttttacgggccgccgggcaccggaaagactactttggcaaaggtcatagctcacactaccagtgctgagtttatgcagattaatgcaacctctgcaggcaagaaggacatggaagaggtcgtggagcaggcgaagaataatcagggaatgtatcagaagaagacgatactttttatcgacgagatacatcgcttcaacaaggggcagcaggattatctgcttccgtttgtggaggatggcaccattattctgataggagctaccactgagaatccttactttgaggtaaacggagccttgctttcacgctcagtcatttttgagcttaaaaagctgtcaacggatgatataaaggtacttcttaagagagcactgactgacacagaaaagggcatgggtgcatacaatgcacagatagatgatgatgcacttgatttccttgcagatgtgtcaaacggagatgcgagagcggcgctcacagcgattgagcttggtgtactgaccacggacaggtcagacgatggcatcattcatatcactatcgatgtggcgagcgaatgtatacaaaaaagagttatctcctatgataagaagggggataaccattacgataccatctctgcttttataaagagcatgcgcggctcagacccggatgcggcggtctattatctggcgaggatgctttatgccggagaagatgtaaaatttatcgcaagacgaatcatgatacttgcatcggaggatataggcaatgcagacccgatggctatggttgtagcggcatcggcggcggcagaggtcgagcgcgttggaatgccggaggcacagattattctgtcacaggctgtcacatacatggcatgcgcgccaaagagcaatgcatcatataatgcgatatcggcagcaatgagctgcgtgaagcagacaaagacaccggctgttccggcacatctgcaggatgcccattatggtgcggcagaaaagctcgggcacggagtcgggtacaaatacgcacacgactatccaaatcactatgtgaagcagcagtatctgccggatggccttacagacagagtgttttacaagcctacggatataggctatgaggcaaagataaaagcacacatggatgagcttcacagagactgtgatacatgaaagtgcatagatgaagcttgaataattgcaaatagttgataataacataaatatttaaaaaatcagaccaggaggatctttaaatgaaaaagtatacagaaatgacaaaggacgagttaatgcaggaaaagacagcacttgaggctgagtacgagaagattaagaatcttggcttaagccttgacatgtcgcgtggaaagccgggagcagagcagcttgacctctcactccctatgctcgatgtcttgaaatcagacagtgatatgaaaagtgaatcaggacttgatgtgagaaactatgcatgtctggacggaattcctgaggcaaaggcccttatcgcaggcatggtaggagcaaagcctgagcaggctatagtatatggaaactcaagtctcaatatcatgtatgatcaggttgcacgtgcatttatctttggtctttgcggcaatacaccatggtgcaagtttgacaaggtgaagttcctctgtcctgtaccgggctatgacaggcactttgcaatcacagaggagtttggagttgagatgataaacatccctatgactgaggatggtcctgacatggatatggttgagaaatatgtcaataacgatgcctctgtaaagggaatctggtgtgttccaaaatactctaacccacagggtgttgtatactctgatgagacagttgagcgttttgcaaagcttaagcctgcagcagatgattttagaatcttctgggacaatgcatacacagttcatcatctctatgatgataagcaggcagagattccaaatatccttgagctctgcgagaaagagggaaaccctgatatggtatttgagttctgctcaacaagtaaggtgacattccccggtgcaggcgtggcaggtatatgcacatctgagaaaaaccgtgaggatatcaagaagcgccttactatacagacaatcggacacgacaagattaatcagcttcgtcatgcgagattctttaaggatgtagatggtatcaaggctcatatggcaaagcatgcagctcttatcagacctaaattcgagctggttgagaatatcctcacagatgaaattgcttcaagaggcatcggaacatgggttaagccgcttggtggatacttcttcggatttgaggctctttcaggctgtgcaaaggaaatcgttgcaaagtgcaaggaagctggtgtcacaatgacaggtgcaggctctcctttcccttacaagaaggatccggatgacagcgtgataagaattgctccgacatatccatcacttgatgagctgaaaaaggctgcagaggtgtttgttgttgtcacacgccttgtcagcgtaaataagttgcttgaagcataaaatcactgttatgtcttaacggatagacgtacaattcactgttatgtcttaacggatagatatgcaattctctgttatgtcctaacgggtagagctataattggcatatttgtctaaaataagtatgtgatatatgtataaaaactaaatgaatatttgtgcacattttttcgggatttggtatttacaaatcccgatttttgtgtaagatataaatatctttttaaattgtgtcttgcatatgttctatgcaggtttctttttgtggcatttcggccactatttttttcccttgatttttagtttcatatatttgatttttgattttatttaacactattattttagacttagatgaagaaaggatttaaatattatgaaggaaatttttcaggaatatggcggaatactcataacagttgtagctattttatcaatcatcctcgttgtaacagcggttataggctctgatgcaacaggcatagtaggaaagacatttagtgatctgattacaaacttttcaaatcatgccaatatgagtgtcaaataagaggtggtacatggagcttggaaaagaatattttggaccgctttggagctttgtagccagcaacgagataacggatatagattataacggcaaagaaatatggcttacaaatatattcaatgagcgtttcagggccaatcagcagtttgttacacagtatatgacacctgctttcgtggagcagtttacacagcgcatcgccaatgtcgtaagcagacagttcaataagagaaatccggagcttgaggctgagacgagcgagcttcgtgtgacgatactgcatgaatcggttgcgaagtcaggcaggagcatcagcatacgaaagacaccgccgcttatcagactgacagcagaatctgcaattgctgagaaattctgctcggaggagcttttagctgtactgataaactgcgtaaagaccaagatgaatatcaccttttgcgggatgccgggcatcggaaagacggagtgcgtgaagtttttttcacagtttataccggcgaatgagcgcgtgattacaattgaggatactcttgagatacgttatgccgagacaaatccgggcaaggactgtatagagatgaaggtgagtgaggatgtgtttggctactctgaggctatcaagtcatgtcttagaatgaatccaaagtggattatgctctcagaggcacgctcaaaggaggtaaaatatctgctgcagagctggagcacaggtgtgcgtggcatgacgacacttcatacagatgatgtgcgcaatataccggacagaatactcaatatgctagagagccgtgtggatgcagagcgtatggagaatgacatatatcaggcacttgatgtgggaattttaatccgcaagagaagaaatgaagacggagtggtgtacagatacatagaccaggtgtgctttttctacagggaaaactataccaatcatgtgtttatgcttgtatcagacggacagatagtgactcacgatataccaaatgtcatacttcgcagatttaaaagagagggtgttaatgagccgtttggcgagtcctttgtcaatgagatacggatgaatgaggccatgatgagtgaggagagggaggcttaggaatgacatatatattgattttatttctgacatatgtgctgcatcttctgctcaagctaaactgggtgtgtacagctgtggtacttgtttttcttcttgttatgcagcattttcaccgaatcaaaggccaaagatttcaggaagcgcgaaagcgctttctggatgtatcgctgtatattgacaccctgctgtattcgtttttgaaggagcataagataatccgtgcatttgaggatgtaaagagcacactggcagatggtcatatgaaggagactgtgagcagggctattgatcatatgatgctcacgtttgatgagacagaggtgtttgtggatgctatgaggattattgaagatgagtacaagtgcaaccgaatagtaaatgcacacgagtttatggcacacgctgagtactatggcggtgatattaaagaatcagccaggatactgcttaaggataagagtgcatgggagcgcaggatactgcgcaatatagaggacagacagaggatgtttcatcagattatcctgtcagttgtgacctctgttatcattagtgggatcatactttatctgccggttttgagcatggatatcagcagcaatatcattgtgcagatactgtctgtagctcttatagtgcttgatgatttaatcatactctgggggcagaaatttcttgaagtggattatcttggaattgatctgctgccggaggatgataagcatgccaaaaagcttgaggaatacaaggcatacaatccggcaaaggagcttcgtacgtcaattcttatggctgttataccggcgttagccagtgcatttttactgtatactgacagacaatgggcggctgtggcagctatgggagcagctcttatatgtttgaatcagcaccgtataggtcacaggcttatgaagaaaaatctgatagcggatgtaaagagtgcatttcccaagtggctgatggacctcgccctattgattcagagtgaaaatgtgcaggtagccatacagaagtcgagagagcatataccggtgatacttaaggaagaggtaaatacgcttgtggagagattggacgtggagccggagagctctgacccgtatcacagatttctcgactgtttgaacctgccggagataaacgcagccatgggcatgctgtatgctgtttcgattggaaatagtggcaattgcggaagtcagattgatgagctgattacgaagaatctggagatgcttgatgtagcagacaccgcgaggcttaaggataagaccgccggcatgtatcttttgtttttggctcctgttatcacagcatcatttaagatgatagttgatatggctattttccttataagctttttatcatacaaggtagtgtagggggtgtgttgtgagtcagataatgaagacctttttaggggtgtttttgattatgtttatggtggttacatcatcaggtgtgctgtcgggatttatgactgtcgttgaggcacagaacctacatgcgcagatcatcaatgagcttgaggacagtgattatgacagcttggttgcgcagacctgctttgaaaatgcatcaaaagccggagatacactggagcttaaactgtatatgacagacaattccataaggacagtcacagacgcatcacaaatcgcttcgtcagatgagatagaaaaggcaagagtggagcttaagttcacttacgcggtagcatttttcggaatagagcaggagcatgtgctgagcggatatgcgttgtagtacttttcttgtggatatggctgtataagaggaggaaaacagatggagcttttaatagaagaattgggaggaagcgttattatgcttcttttaggcagtggagtgatcggtgtgctcgtgtatgtgtctactctgctgtgatagtaactgaattgattaaaaagtatgtaaaggtaagagaacatgaaagaagtattcagacagtatggaggcgtgctgattgcagcggccgccacaagtgcatttctcgtgttgatgggaaatattgtgctggctcagggaggcatgcttgcgcagcttataaatatatggggtaacagtgcaatttaaataatcgggagactatagatgaaggagataatgcagacatatggagccatgatagtggcggtggttgtgggaattgcgctgctgtcgggatttggggctctgaagaacaaaatgagtgtggcatttgcgccacaggatatattgagcagcgatagcgcaaacgacagctatgacagcatgaaaaatataccggttccgggtattgagctaaaggagaaaatgcgtcagaatgcagtaagctacagtgtatatgacctgcttgatgttacagcgcatgaggataatctggataagcttgaagtttatgccctgtatgattcgggcagaaattactgtacaggcagcatatcagccgatggctcgtcaattagctttccggattatggtgtgtatgatatgcatgtcaggataacctgccaaaacggcacaagggatcatgtgaggataagtattccaattaatagaaaggtagcggatatataaaatgaaaaatgaaaaacaacacagacttttattcattataccggcagtgataatagcaataattcttatcatatgtatagcagtggcagtaagctcaaaatcaggagaaaaggggaagaaaaaggattcccggtctgtcagtgtgactgaaaatacacaggatattgtagcagaaagcgagacgcttgagcttgtgaaaaaggatgcattgaaggaaacaaatgtagttgataaagataataagcaaaataacggtacgcaatcagatacaaatgataattccgcaccggcagccggtaattcagataatgcaaatacagcgtcagataaatcttctgacaaatcatcagaagacaaaacagcagcagataaaaagacatcgacaggcagcaataacacacaacaacctgcaggtaacgattcaaaaccggcagcatcaaatcagacagtcgcacctgagccggctcaaagtgagcccgcgcagccggaagcaccaaaaaatgagtatgttgcaccgggatggatattttatggcagtaaggctggaaatggcatgacaggggagcagaaggcgtatattgattcagtgatacagcagtggacaaatggaggtttgtcagatgatgcaatcggagatatgtttattgaaaaaatagcacaggagtggcagcttccgatgataacggctggcgtgacaagtaatttactatgtctgtttccttcaagagcagaagttccggattatagtttaaatttggccgatatgaacggagcttataattttgttggtttgtatacaaatggagaatatgatgaaaatggatatcttaaatgttattattgggaagcgggtgttctttaggaaatgtgtttgcatgatgtttgtggctacagttattattacttatatgttctcgtttgattgcaatatagtgaaggctgatgaatgggatgatgctgtgaagtattattctaattatggtaatgctgctgtttttaaggctacagatagaacaaatggcaatatttatttttgttcagcaggaaatacatctacgtcgggaaccaagtataggacaataggatacaaaatgacaattaaagggatagctggaaatgagatacagaaaatttatttccagcttggtggacaatatctgacactcttaaacagcaaaaagcaatcaggcaaggagtatatgctttatgtgattactttaaagaatatgaaaaatcgatttaatacgcaggccctcaatgcccttagctccggctcatgcaccatcatcctcgatgcctgcatggtgcttcgggtaaatggcaagaacaagggtggcatgaatgataatggtccttcctggggaaaggtttatactacatatgcaggtatatccaaagcggcaaactggacggacagcgcactctcagcgctgtattcgtattatggaaagacggtgagaggactgtttcatacaattgatgtcaggaagtctacaggcataagcagtgtatcagggggaggtacatactgctatggtacatatgtgacaatcagtgcaagcagttctgccggatatgatttcacgaattggaacaatgattcgtcaatgagctcatcatcatatggtttttatgtgaattcgggtggtacttatacggcatacgcaaaggcaggtactatagctgtgacattctggcggaatacgagtgcgtctgattcagaaaagacctcaaagagctacacatatggagacatcaatcaggcttttccggctgtgggctggcagatggccgggtatcatatgaatggctggggaaataattcgtatgatacgactgccggatatccgttattgtgtggtgtggcaaacagctggattgagtcaaacagaccgtcgaaaaatatatacgcagtatggcaggaaaacaagtataccatagaatatgataccggtgtatctgccactgtgaagtatagtgatacggtgacattgccaagccagcatatgtgtataggctggcttttaggagaagagtatcctgatataaaatatgcgccgggagagagtatacaggtagctgatttatgcaggatactggggatagagtatacagataaggcggtaatacgtatgtatgcactttgggagcatgagcctaccatagaggcggatgatatgttcttttcgataaagcaggcaaggaatggcggtataacagagcagctgataggaagccttatatctgcaacagatgtggaggatggtgatattgcgtttggcgataacgagataaattacctgaaagtgaaaaattttgatgaccgtaaaatagaaagtgcacgtgacaaggatatcatagagatagtgcttgaggctaaggacagctatggaaatatcacgcaaaagactatatccatcacatttacagatactcaggtcaaggagagaaccaaagcctttggaaagattagattcataagcgaaaagtattatggcaaaaataaagcaggaggcctcatggagaactcccgctggttaaacgatcctgaatttaattctcttcttcggcaggccttggcaatttgatatagacctttcagattcggtttttatcaacagcctctatgatggcacaaaggatcatgtgaggataagcgttccaattaatagaaaggtagcaggcgtatagaatgaaaaatgtagtacttggaataataggctgtcttattgtagtgtatacagcgatgcttgggcttagtgtatacaatatgacagtcagggaaaaccagatggaaaagagtctgtcattagcactttcgggtgctatgaacagatattacgagccgaatatgtatatcgtggataaaaagcccgtcagcagctatgatgtggaaaaagctctcatagaggacattaatgagaggcttacagcaggcggtactgcaattgccacagtctatgtatgtgatatggaaaagggcattatttcagcaggaatagaggaagagttcaagcttcctacaggtgtgacaaagaaaataagctgcaaaaagactattgtagcagatcagccaatggaggataactagcgtatgaagaatggtatttgtattacagcaaaaataaagcaggaggtctcatggagaactcccgctggttaaacgatcctgaatttaattctcttcttcggcaggctttggcaatttgatatagaccttttcgattcggtttttatcaacagcctctatgcggagaagaatattgtcatcagtgatgattatttcatttttttcaggcaggtggtcaagcttttcaaggcagtagccaccgattgtgtcatagtcgtctgattcgaggtgcagaccaagctcatcgcttacatcctcgagatttgcagagccaagaactatgtattcgtagtcatttattcttgtgatatcatcctgctcgtcagagtcgtattcatcacgaatctcaccgactatctcctctaagagatcctcaagtgtgatgagtccggctgtgacaccgtattcatctaagacaatggcaagcgatatagatgattcgcgcatctcgagaaacagattcgctgtattcttgtgctcatatgtaaagtaaggctcacgcatgatatttctgatggaaaaatgctctttatcctcatccttaaggagcagcagatccttcatatttacgataccgattacgttgtcagtgctttcgtcatacacagggagtctagtgaatttatcctctctgaatatggaaatcaaatcatcataagtagaatcaacatggacaaacgtcatatcaatacgcggaaccatgacctccttggcctcggcatcgccaaaatcgaatacattgtgaatcatatcacgttcttcatcctcgatgataccgtcctcctgtcctacatcaacgattgtacgaagctcctcctcggtcatgacgcgcttggcatcgctctgtcttattccaaagaggaaaatgactccgagtgaaagcttgttgatgataaatattacaggtgtcagcactaccatgagcactgatataaagcctgcgattgagagtgaaatcttgtcagcctttatggtggcaagtgtcttcggagagacctctccgaagatcagtatgaggaatgtaagtattccggttgcgacacctgctccgacgctgccaaacagcttgatggcaagcgaggtggtgagcgatgatgctgaaagatttacgatgttgttgccgataaggatggctgagagcatctttggagagttctcagtcaccttgagcacctttttggcttttgtgttgccagcctcagccagggttctcatacgtattttgtttacggtagtaagagcggtctccgaagatgaaaaaaatgcggagagtgctaatagtattaataagaatataatctgcgatatgtcgtcagcgtccaaatattttacctcgtgatatgaattaataaatgtgtttatttatcgtctgtgctgtagttaggagcctcttttgtgatatggatatcatgagggtggctctccttgagagaagcagcagtaatcttgacaaactgtccgttctccttaagatcttcgattgtcttgcaaccgcagtagcccattcctgagcggataccaccaacaagctggaatactgtatcctcaagagttcccttgtaagctacacgaccctcaactccttcaggaacgagcttcttagcgccctcctggaagtaacggtccttgcttccgttttccatagcagcgatagaacccatgccacgatataccttgtattttcttccctgataaagctcgaaggttcccggagcctcatcacagcctgcgaacattgagcccatcatacatacgttggcaccggctgcgagagcctttgtcatatcacctgagtacttgataccaccatctgcgataacaggaactccatactccttagcaaccttgtaacagtccatgatagctgtaatctgtggtacaccgataccggcaacgacacgtgtggtacagatagaaccaggtccgataccaacctttactgcatctgcaccggcctcgataagagccttggcagcagcacctgttgcgatatttccggcgattatctgaagatccggataagcagccttgatcttcttaacagcctcaagtatattctttgaatgtccgtgagctgagtcaacaacgatgacatcaacatgagacttaacaagagcatcaacacgctccatcatgttgcctgtgatacctactccggcaccgcagaggagacggccctgatcatcctttgctgaaagaggatacttaatctgcttctcgatatcctttatagtgataagtcccttgaggttgtagtccttgtctacgatagggagcttttcctttcttgcctttgcaagaatcttctttgcttcatcgagagtgatgccctcaggagctgtaatgagattctcagaagtcatagactctgaaatcttctttgtgaagtctgtctcaaatttcagatcacggtttgtgatgatgccgacaagcttgccgtcctttgtgattggtacacctgatatcttgaacttggccataaggttgtctgcatcctgtaatgtatggtctggagaaagatagaacggatcggtaataacgccgttttctgaacgctttaccttatcgacttcgtctgcctgtgcctcaatagacatatttttgtggatgattccgataccaccctgtctggccattgcgatagccatttttgattctgtgactgtatccattgcagcactcatcataggaatgttaaggacaatcttcttagtaagatgtgtctgaagctcaatcatatttggtgttacctcagaatattgtggaactaagagaacgtcatcaaatgtaattccttcgccgataatagtacccatttttaaattcctctctttcttatgttattatactggtatactttatatactaatgtaatttgtatgatgatagcaaattaaagagtgggtgtcaagcagttataagcccgatatgaaattattatattatttattagtaaaactaatgtaagtcttttgcaaataaagtaaaaattatgttatattttatattaagtggctttaaggcaatgtttgcatgtcacactaaggcgtggatagtaacgatttttgagccacaataaactaaaccggggagaaaaatatggaatttcgaccatgcatcgacattcacaatggaaaagtaaagcagattgtcggtggttcattaaaagacaggggcgattttgccagtgagaacttcgtctcagagcaggacagccggttttatgcagatatgtataggaaatcgggcataaagggcggtcatatcattctgctcaattctgtggacagcgagtattatgaggatacaaagaagcaggctgttatggcgcttgaagcgtatccgcagggcttacaggtaggtggcggcatcaccgcagacaatgcgatggagtttatagatgccggtgcagcagcagttattgtgacatcctacgtatttaaagacggcaggataaactatgcaaatctaaacaggcttaaagatactgtgggcagtgacaggctggtgcttgatctgtcatgtcgcaaaaaggatggacagtattatatagtaactgaccgctggcaaaacttcacggatgaggcagtgaccacagagcttttggataagctatcctcatattgctgcgagtttctggtacatgcagtggatgttgagggcagggtgaacggcattgaaaaggagcttgtcgccatgcttggcagttggggaaggataccggtcacatatgcaggcggtgtgtcatcatttgacgatttaaaatgcatcaggcagcttggacagaaccatttgaatgtgacaataggcagtgctcttgatttgtttggcggtgagatggagtacgataaggttatagctttttgcaataataaggagatttaaaatggcaaaatacagtaagaatgatattatccgcatagtggatgaggaggatattgagtttatacgtttacagtttacggatatctttggaacattaaaaaatgtggcaattacagccagccagcttgagaaggcactcgacaacaagtgtatgttcgacggatcgtcaatagagggctttgtgaggattgaggagtcagatatgtatctgcacccggatcttgacacttttatgatttttccatggagaccacagcagggcaaggtcgcacgaatcatctgtgatgtctatatggcggatggtacaccgtttgagggagacccgcgctatatattaaagaaacagattgaaaaggcaaagcagatgggctatatatttaatgtaggtccggagtgtgagtttttccttttccacctggacgagaacggacagcctaccaccatctcgcatgagagagcagggtactttgacttgggaccaaatgatttgggagaaaacgcaagaagagacatggttctaactcttgaggatatggattttgagatagaggcatcgcaccatgaggtggcacctgcacagcatgagattgatttcaagtatgaggaggcacttcataccgccgacaatatcatgacctttaagcttgctataaagacaatcgcaaagcggcacggactttttgccagcttcatgccaaagccaaagcatggtgtgagcggctcgggaatgcatatcaatatgtcactttcaaaggatggtgtcaatatatttgacaatgaggaggataagcttggactcagcgaggaggcatactatttcataggcggtattatgaagcatatgaagggtatgacggtcatcaccaatccgattgtcaattcatataagcgctttgtgccgggctatgaggcaccgatttatatcacctggtcagctacaaacagaagtccgcttatcagaatccctgcagcaagaggtgagggaaggagagtggagcttagaaaccctgatccttcagcaaatccgtatctggttctggcactgtgcctggcagcaggaattgacggcataaagaacaagatacagccggatgcggagcttcgtgagaatgtatttgagctcacagaacatgataaaaagagactcggaattgaatcacttcctgctgatttacatgaggcggttgagtgccttaagtcagatgattttattcgcgagatactgggtgaacatatctacgacaagtatatagaggcaaaagaggcagagtggaacgattacagagctgcggttacccaatgggaaatagatgaatatctgtacaaattttaaaggatgtaacaaaccgtgaataatattgttatagcatttcctaaaaaggaagtagccaattcaatcaaaaaaatattagcgcagagcggttatacagtcacggcggttgcaaatacaggagcttcagcactttcgagcatgaatggactgaatatgggaatcatcatatgcggatacagattttcagacatgatgtacagtgagatatacgagtatatgcctagggagtttcagatgcttctcatagcgtcggcagcgggtatcatggaaaaaaatgtggataatctgatgtcattatccatgccactaaaagtgcatgagcttttgcagactgttgagatgatggattacacgataacgcgccgcaggaaaaagctcaggcaaaggcctaaggtacgttcaaaggaggatcaggagatgctaagcagtgcaaaggctgtactgatggaacgaaatggattctcagaggaggaagcacaccggtatatccagaagcgaagcatggataacggcaccggtcttgtggaaacagcacagatgatactaagccttatgactgatgtgtagtgtacgctttatgaagccagacagaagagcgtatgatagtagctgcaaaggcttgaacagttactataaaaaataatgataaaaaaatatatttacacttgcatggtaaagtgataaattagacttattgtaaagtaacaaaggagagataaacatgtttcagattaatgataactttcagaaattaccgggaagctaccttttcagcacaatagctaaaaaggttgcagcttatcaggaggcaaatccggataaagagataataaggcttggaatcggcgatgtaacacagccgcttgcacctgctatcatcgatgcactgcacaaggcagttgatgagatgggaaatgcagctacattccacggatacgcacctgacctcggatatgagttcctcagaaaagcaatttcagacaacgactacaaggcaagaggatgcgatatctcagcagatgagatttttgtttcagacggagcaaagagtgattcagccaacatccaggagcttttctcagcaaacagccgtatcgctgttacagaccctgtttaccctgtatatgttgattccaatgtcatggcaggaagaacaggcacatacgatgctcagaaagagacctggagcaatgtaatctatatgccgtcaacagcagataacggttttgttccggagcttccaaaggaagtaccggatatgatttatctgtgtctgccaaacaacccaacaggaacaactcttaaaaaggagcagttacaggtatgggttgattatgcaaacaagaatggttcagtcatcatctttgatgcagcctacgaggcatatatcagcgaagctgatgtgccacactcaatctatgagtgtaacggtgcaaagacatgtgccatcgagcttagaagcttctcaaagaatgcaggctttacaggtgtgcgtcttggctttacagtagtacctaaggagcttaagtgtggtgatgtatcacttcatgctatgtgggcacgccgtcacggaaccaagttcaacggtgcaccatacatcgtgcagagagcaggcgaggcagtttactcagatgccggaaaagcacagcttaaggatcaggtagcatactacatgaacaatgcaaagacgataaagacaggtcttgcagaggctggctttacagtatacggcggagtaaatgcaccatacatctggctcaagacaccggatcacatgacatcatgggagttcttcgattatctgcttgagaatgccaacgtggtaggtacacctggctcaggctttggaccaagcggagagggctacttcagattgactgctttcggaaactatgagaacacagtaaaggcacttgagagaatcaaggcactgtaaaaataaatcaggttaaataaaaataccgtcagggcgatgttccctgacggtattttttgtctttgaaattttcataaagtgtatttactgtatacttttcagcaagaaaaactttatgcgaaaagcatgatttaatttttcttgaaaccggctctcttacgaagagtagggtcaagaatcttctttctgattcgaaggctctcaggt

SEQ ID NO: 9 - DNA, 2936244 bp, Eubacterium rectale (residues 1,468,123-2,936,244 of 2,936,244)
  misc_feature (604733)..(604884): n is a, c, g, or t
  misc_feature (1812041)..(1812050): n is a, c, g, or t
  misc_feature (2498666)..(2498675): n is a, c, g, or t
  misc_feature (2498920)..(2498929): n is a, c, g, or t
  misc_feature (2502606)..(2502615): n is a, c, g, or t
  misc_feature (2565559)..(2565568): n is a, c, g, or t
  misc_feature (2720136)..(2720145): n is a, c, g, or t
  misc_feature (2720395)..(2720453): n is a, c, g, or t
  misc_feature (2838097)..(2838250): n is a, c, g, or t
gttacctcaagaagctcatctgtatcaataaagtcgatagcctgctcaaggcttaatactttaggtggtacaagtgtgagtgcctcatctgctgatgaagaacgtgtatttgtaagatgcttcttcttacatacgttgagctcgatgtcctcggcctttgaacactgtccgataaccattcctgagtaaaccttggcacccggtccgataaagagtgttcctctctcctgtgcagagaagagtccgtatgttacagcctcacctgactcaaaggcaatgagtgaacctgttgcacggtatgcaatctcacccttgtatggctcgtagccgtcaaacatggtgtttaagattccgttaccctttgtatcggtcataaactcgccacggtatccgataagtccacgtgcagggatatggaattcaagtctggtgtagccacctgcgatagagcccatatttctaagctcgcccttgcgctgctgaagctttgagatgacagctcctgtaaactcgtcaggtacatcgatgtaagcaagctccattggctcaagcttcttgccgttttcgtcatacttgtagagcacctctgccttacttacagcgaactcataaccctcacggcgcatgttctcaataagtactgaaaggtgaagctctccacgtccggaaaccttgaaggaatcaggtgagtcagtatcctcgacacgcagtgaaacatctgtgttgagctcgcgaaagagtctgtcacggatgtgacggcttgtgacaaatttaccttcctgtcctgcaagagggctattgtttacgatgaagttcatagagattgtaggctctgaaatcttctggaaaggaatagcctccggtgcttccggtgagcagattgtatctccgatgtggatatctgcgatacctgagattgctacaatcgaaccgatgttagcctcggctacatctactttgttgagtccgtcaaactcgtaaagcttgctgatacggaccttctcaagcttgtcagggtcgtggtggtttacaacgacagcctcctgattgaccttgattttaccgttatccactttaccgattccgatacgtcctacatactcgttgtagtcgattgtactgatgagaatctgtgtgttggcatcaggatcacctgttggagcagggatgtagtttacgattgtttcgaagagaggagtcatatcctttctctcatcgtttaagtccttcatagcatatccgtctctggctgatgcgaaaacgaatgggcagtcaagctgctcctcagaagcatcgagatccatgaagagctctaatacctcatcgatgacctcattaggacgtgcctccggacggtcaatcttgttgacgcagacaatgataggcagcttgagtgcaagagccttcataactacgaacttggtctgtggcataacaccctcgaaggcatcaaccacgaggataactccgtttaccatcttaagaacacgctctacctcaccgccgaagtcagcatgacccggagtgtcgatgatgttgattttgatgtccttatactgaatagctgtgtttttggagaggattgtgatacctctttcacgctcgatgtcgtttgaatccattactcgatcctgaacttcctgattgtcacggaacacaccgctttgcttaagaagctcatctacaagtgttgttttaccatgatcaacgtgggcaataattgctatattacgaatatcgtctcttgttgttttcatattttccttctttctttaataaataaagctaagtttgcaactaacttattctatcataatttttccaatgtgcaagttttcattgaaagtttttataaaattaagtgaaatgttattggatttgtcgacattatttgagaaaatatactttgtggaaatgttaaaaatagctggaaaaacattttacaaaaggaagggagacaaaaattcatggcagataaaatgtttgaaaacaaccaggtatcaataatcggagaaatcgtttcagattttcagtttagtcacgaggtgtatggtgagggcttctatatgatggaggtttcggttagaaggctttcagattgcatggactatattccggtgatggtgtcagagaggcttatcaatgtggagggtgactacataggcaaaagcgtatatataggagggcagttccgctcattcaacaggcatgaggagaagaagaacaggctggtgctgtctgtttttgcaagagagcttgaggtattggacagtgattatgatgaggatgcagccaatcagattttccttgacggctatatctgcaaggaggctatatacaggaaaacaccgcttggacgagaaattgcagacctgcttgtggcagtgaaccgctcatatggcaagtcagactatattccatgtatctgttggggaagaaatgccagatttgcgtcgacctttgaggtgggtacacatgtgcagatatggggcagaatccagagcagagattatgtgaaaaagctcagtgagacacaggtggagcagcgcacggcgtatgaggtttccgtgagcaagattgaggcatagtattttaaatggacagtaactacggatttgtgattttcccgaaaatttgcaataatagtcagattgtggtattttactagatattattggttaatgcttgtaattgttgacgtttacatcagttgtaaactgtaatgattatatatcaggcagaaaagctatgtgtatggaggcatgattattatggaaaacggtgcagtacagatttattatggcgagggacatggcaagacaaatgtcgctataggaagtgcaatatgtgctgcctgtgagggtaaacaggctgtcgttattcagttcctaaaggggaaaaaggagccggagtttttgaaaaagcttgagccggaggtgaaattctttaatttttcaagagccggaatactctttgagcagcttgatgaggagagtaagcaggaagaaatcatgaatatcaagaatggcttcaactatgcaaagaaggttatatcaacaggtgctgacatggttgttgtgcttgatgagattctggggcttttggatttgcatctgatttcaaaggaggagctgtcggatatgcttgcttcaaggcctgatgatgtgaccgtgattatgacaggcagagtacttgacgatggaatcaggaaaatggcagatgagatttataatatcgcgtcggaaaaataataagaaatattgtcatgtgagttgacaatgcacaggcgtggtgatattattagtgcaagtgtgaggcagttatatcatctgctgtatacgaataatttgattaacagatagaggtcgcgcgacttatgagtagctttccggatgccgcaggggcagttgatgggagatgaaaggaatagcgccgaagggatttatcatctgcggatatatctctgggcatatggcgaacagccttatgactgtcatcagatttgatggggagctatcgtgattcatgaagaattgggaccggctctaaggagccggttttttagcgcttagaggcagacaacggcatacttatacgttaagagaatcaaataccgaataaagaaaagcaagaaggagataaaatcatggcaattttcaaaggagcaggagtagcaattgttacacctatgtacgataacgaggaggttaattacgacaagctcgaggagcttatcaatatgcagattgataatggcacagatgctattatcattgccggcaccacaggcgagagcccatgtctgtcaatggaggagcatgcaaaggttataaaggctgccgtagagtttacaaagcatcgtgtacctgtagtagcaggcacaggctctaactgcacaaagacagctatgcagctttcaaaggaggctgaggagtttggtgcagacggactgctcgttgtcacaccatactacaacaaggctactcaggcaggtcttgtgagccactatttgcagattgcagacagcacaaagtgtcctattatcgtatacaacgtaccgggacgtacaggctgcaacgtgcttccggagactatggcagagctctttaagacaaaggaaaatatcgtgggactcaaggaagctacaggaaatctggcacaggcttcaaagacaatgtatctgacagacggaaagcttgatatgtactcaggcgaggatggtctcgtagtgcctcttatgtctatcggagcaatcggtgtaatctcagtatggagcaatgtagcccctgcaaaggtacacaatatgtgcgacagcttcttcaagggcgatttacagacagccttagagcttcagagagaggctcttccacttgtggacgcactcttctcagaggtaaatccaattcctgtaaagaaggctatgaacctgatgggtatgaatgtcggacctcttagaagccctatgtgcgagatgggtgaggataatgcaaggaagcttgctgaggtcatgaaggcttatggcttaaagcttgcatagtacaacgagaaaggatacgataaaatgacaaaggtaattatgaatggctgcaatggcaaaatgggacagactatcacagaaatctgtaaggctgatgctgatatcaagattgtagccggtattgatttatatgatggaatagacaatgactatcctgttttttcgagcatcgacaaatgtgatgtggacgctgatgtggtcatagatttttccaatgccaaggctgttgacggagtactggactattgcgtggacaagcaggttccggttgttttatgcactaccggtcttagtgatgagcagcttgcaaaggttgaggagtgctacaagaaggtggcagtgctcaagtctgcaaacatgtcacttggcataaacactcttatggctcttctcaaaaaggctgcacaggttttcgcaccggcaggttttgacatggagatagttgagaagcatcacaatttaaagcttgatgcaccttcaggtactgcgcttgcgcttgctgattccatcaacgaggctatggataacgagtatcactatgtttacgaccgcagccagcgcagagagaagcgtgatcctaaggaaattggtatttctgctgtcagaggaggaagcatcgtcggtgagcacgaggtacttttctgtggacaggatgaggtgattgagtttaagcatacggcttactctaaggctgtttttgcgaagggggctgttgaggctgccaaattccttaagggaaagggtgcaggtcactacgatatggcggatgttattgcagctaagtagattgaatgaattgcttcattgtggcgataggtcgggcgtaagctctctcaatgtacgaatatgagtacacttgcggattttgcttgatttattggggagtgcgtattatattaaatattataaaacacaacaggggagctggcatttagccggctgagagtagactggtagtgtcttgacccataacctgatttggataatgccaacgtaggataatatcgcacgatttttaggcggatatactcattggcggtatatccgctttttgaatgtgtgggtgattatgaatagttgtaaagagatacagatgaataattttatagaaaagcttaagtcacgcagtcctttgattcacaacatcacaaatatggttactatcaatgatgtggccaatattgagctggcatgtggggccaggcctattatggctatggcaccgcaggagatggatgaggtcacgggtatctgcgatgggctgaacctgaatataggcactccttctgaggagcgctttgaggcgatgcgcattgctgcgaggatggcagcgaaaaagaacattcctattgtgcttgatctggttggtgtgggcgtgagccgcttcaggatggattttgtgatgagcctgcttgacgaggtgcatgtggatgtgattaagggcaatttgtctgaggtcaaggctgttatggagcatggcagatgcgatggcggcgtggaagtgaccgatacggcagatgagtctgatgcaaaggcgcttgcgtgcagggcggccctgcgatatggctgcatctgtgtgattacaggtgagaccgattatgtggcagaattatgtgatgaagctgattgctatgataataatgaaagcagtcagatgagtactgatgcgacgggtaccggtgtgatggatactggtgtagtgaatgctgttgcgtcggatgctgacggatacacgcataattacagggtaggaagcattacaggcggccatcctatgatgaagagggtgacaggcaccggatgtatgctttcagggctcatttgtgcgtttgttgcggctgattgcgatgataaatacggtgcagtcacagcagcacttagctgcatgaagagtgcaggcgggcttgctgcctctgatatgtcagagcacggcagagagacaaacagctgttatttcattaagcccggaaatgctgcataccgggacaggctgattgatgcagtatatcatatatgcgatggtgattatgaactgatgtgaatatcgctttatgacagacaattggtatgcaggtcatgagtcttatatttgtaaaacaacaggataagaggtgaaaggtatatatgaacaaaactgatttaaagctctacgctataacagacaggcagtggctgcacaaagcgaggctttctgagcatgtgaagcttgcaatagagggtggtgccactatgattcagatccgcgacaaggatattctgagtacggattctgatgcagggcttaaggatgagtataatgaggctcttgaaataaagagaatctgtcatgagcacaaggtaccgctcatcatcaatgataacgtgcagtttgcaattgatatagatgccgacggagtacatctgggacaggatgacatgaatccggcggaggccaggaagcttcttggagctgacaagataataggagtcacggcaaagaccgtggagcaggcaaagagggcagaagctgatggcgcggactatctgggaagcggagccgtgtttggctctaccacaaagctcaatgcaaagcctatgacaaaggagcttctgcgcgaaatcacggcggctgtcgatataccggttgttgcaatcggaggcataaatgcagacaatgcagtcacgctaaagggcacagggattgcaggaatcgcagtggtaggagcgatatttgcaagcgcagatataaagggcgcagccagggaactcgcagaaatatgcgacaaaattctgtaatcacagtatgacatactgctataactacagtaattaaacaatattttgaagatactgaacagttacgagaaatcacaacattcagtagaaaggagcgtaaatatgcatacagcacttacaattgcgggaagcgattcaagcggtggcgcaggtgtgcaggctgatttaaagaccatgcttgcaaacggtgtgtttggcgagagcgttatcacggcactcacggcacaaaacaccatgggagttgacgcggtgatgaatgtgccggcggattttatcgaggcacagatgaaggctgtttttacggatatttttccggatgcggtgaaaatcggtatgacatcatcggtagatacaattgaggcaattgctgcaggacttgtaaaatataatgcaaaaaacatagttctggacccagtgatggtcgctacaagcggaagcaggctgcttgaggaaaatgccgcaaacactctgatggataagctttttccactggctgacatcatcacgccaaatatccctgagcttgaggtgatatcaggcagacagattgaaagcacagatgacatcatagaggcatcaaaggctatttatgataaatacggctgtccggttttaagcaagggaggtcatttcacagacacagcatgtgtgtgtgactatttgtgggatggaaggcaaatcatcacatttgagaccaaaagagtggataatccaaactcacacggcacaggttgcacgctttcatcagcgatagccagcggcctggcaaagggacagccgctcgagcaggctgtggataacggcaagcgatatgtcacggcatgtttaaaagccatgcttgatctggggcacggcagcggtcctatgaatcatggagcattaattttgcaataaataatagcaactattcagattcacttagaacaaaaagctgatgcgtcgtgcttgcatataagtggcagatttttgttcacaaggaggtctgaataattactaattaataagactaataacaataagaacaggagagtacaatgagtaattacacaacacagatggatgccgcaagaaagggcatcgtaacacctgaaattgaaaaggtagcaaagaaagagaagatggatgtagacaagctgatggagcttgttgcaagcggaaaggtagctattcctgctaacaagcatcacaagtcacttgatgcagagggtgttggaagcatgcttcgcacaaaaatcaatgtaaacctcggtgtgtcaagagactgcaaggactatgatgtggagatgcagaaggtcatgagtgctgtaaagcttggagcggaggctatcatggatctttcaagccatggcaacacacagccattcagacagaagctcacaagcgaatgtcctgcaatgataggaacagtgcctgtttatgacagtgtaatccattatcagcgtgatcttgcgacacttacagcacaggattttgtcgatgtagtcagactccatgctgaggatggagtggacttcgttacacttcactgtggaatcacaagaaaaaccatagaccagattaaaaagcataagcgtaagatgaatattgtaagccgtggaggaagccttgtctttgcatggatgtgcatgacaggagaggaaaatccattctacgagcactatgatgagatacttgaaatctgtgaggagcatgatgtgacaatctcactcggagatgcctgcagaccgggctgtttagcagacgcaacagatgtatgccagatagaggagcttgtaagacttggagagctcacaaagcgtgcatgggatcacaacgtacaggtcatggtagagggaccgggacatgtgccgcttgatcaggtagcagcaaacatgaaggtacagcagtcaatctgtatgggagcaccattctatgtacttggacctctcgtaacagatattgcaccgggctatgaccacatcacagcagcaatcggtggagcagtggcagcgatgaacggagcagctttcctgtgctacgtgacacctgcggagcatcttgctcttccaaatgtggaggatacaaagcagggcatcatcgcctcaaagattgcagctcatgcagccgacatcgcaaagggaataccgggagccagagatatagatgataagatggcagatgccagacgtgtgctcgactgggatgcacagtttgcgtgtgcacttgatcctgagacagctaaggctatcagggatgaccgtcttccggaggatgaccacagcgaggcatgcagtatgtgcggtaagttctgtgcagtgcgaagcatgaacaaggcacttgcaggagagtatattgatatactataactattcagtacagaaaatgcggtaccgcatatttcgtaagaaaacgtatattatgtaggagcaacagtgaaggtactgaacagttacgatatactttaaggtgaggcagtaagtaatggaaagtaaaaagaacattaaaaaatcaactatttcaatcagaaagcttgccatggcaggagtgcttgtggcagttgccgtagcaggaagcttaataagctttcctgttgccggcagcaaatgtgcacccatacagcacatggtaaatatatgcgcagcagtatttttaggaccagtatggggtgtcggtgtggcattttgtgcgagtgtcatcagaaacctgacagggcttggaagcctcatggcattcccgggaagcatggtaggtgcactgtgctgtggactgatgtacagattcagcaaaaaaatcataccgacatgtgtcgcagaggcgcttggtacaggcatactcggaggtcttgcagcgtatcctcttgcaaaatatgtgatgctcattcagccggaaggcatgtttatatacatagtgccattccttatctctacagtggccggaagcatagttgcagcaattgtcatgctgattcttaagaaaaatggcgcactggcagcatttaaggggaatctgtagagatagtttaagactaatacagaaacgttatattataaaagccttaattgttactaaaagttaatcaatttgggattgttaaataatagtcaatgtggtatagttttcttcgaacggtattcgaaggaaactgtatcatggaggatgtgttgtcaccttatgacagagcatatccggcagacacaagaaagccaaaagcacattgctgcatcagaatatgaagcagacagcaaagtgacaggcgcgcacaggataaatcgaccgctgccatacggcatatggcggagatgatatcagctgcgatataaggaaatggtctgaccggcttggaaagaaggtggtagcatgaaaataggcataatcggcgcaggcagagtgggctgttctataggtaaatacctaaggacaaaggacatagagcttgcaggctattatgacgtggattctgcggcagctaaggaggctgcggagtttacaaggacagagagctttgattcgctaaagcaactggcggatcaatcacagattatatttatcaccacaccggattcatttattataccggtttgggaacaattaaaagagctgtctctaaggaatcagattatatgtcattgcagtggcgcattatcatccgattcattttccggaagggagagcatgagtgtatcatgctgttcaattcatccaatgttaccgttcagtaacagattttcatcatatgagcaattaaataaagcatttttcacagtggaagggcaggatgctgcggttgaagcaatatccgggctgttttgttctattggaaatgaggtatgtcgcatcgatggtgctaaaaaggcaaaataccatgcagcggcgagcattctgagcaatcaggtgattgctgttcttgacatgggttacactcttttggaggactgcggctttacaagggctgaggcggtaagagccacaggtcagcttgtgatgcgcaatatcgaaaatgtacttgaagcaggctgtgacggcgcactgaccgggccaatcgagagaaacgatattgaaacagtgaaaaaacatatcgcatgtatgcaaaatgacgatagtgacgatgtcagcttgtacaaaatgcttggtacaaaactggcaaatattgctgaaaagaagaatcctgataaggattatactcagatgatggaattgctaagaggctgacaataccgtgaatattaaaaaaacggattgttgcagaaagacagagggattggacaatgaaaaatacagtaataacttttaaacaggcaaaggaaaagggcgagaagctcacgatgctcacagcatatgattattctacagcaaagctcatagacgaggccggaatcaatgcgattttagtgggagattctctcggcatggtggtgcttggctatgaggatacactttcagtgactatggaggatatgattcatcacagcgcggctgtttcaagaggaataaaggacacactgcttattacagatatgccttttatgtcatatcagacatcggtttatgatgcagtggtcaatgcaggacgactcgtgaaggaaggccatgcgcaggctgtaaagcttgagggtggcagggaggtatgtccacagataaaggctatcgtggatgcgtcaattccggtatgtgcacatttagggcttacaccacagtcagtaaacgcatttggcggctttaaggtgcagggcaagggtgaagaagcagcacagaagctccttgacgaggcccgcgcagtcgaggaggcaggagcatttgcagtggtgctcgagtgtgtgccaaaggcacttgcaaaaaaaatcactgagagcataagtataccgacaattggtatcggagcgggagcagactgcgacggacaggtgctcgtatatcaggatatgcttgccatgtatgcaaatatgaagccgaaatttgtaaagcagtttgcacaggtaggaaaagagatgaatgaggcctttacagcttacaaaaaggctgttgaggagggaagcttcccgggtgaggagcatacctttaagatggatgagacaataattgacaaactgtactaatatcgaagaatagttacgaagcatagaagaataaggagacataaaatgttaatatacggacaaatcaaacaggttagagaagcagtaaaggaatggaagagagaaggcaaaagtgtaggctttgtacctacaatgggctacctccacgagggacacaagagcttaatcgatgcggcaagacgtgaaaacgacaaggttgtagtgagcatttttgtaaatccaatgcagtttggccctacagaggatttagacagctatccacgtgatttaaacagggatgcaaagctttgtgaggatgcgggagttgacattattttccatccggaggctgatgagatgtatgcagacggcttctgctcatatgtggatatgaatggcctcaccacagagctttgtggaaaaacaagaccgattcatttcagaggtgtgcagacggttgtcctgaagctgtttcacattgtgacacctgaccgcgcatactttggacaaaaggatgcacagcagcttgcagtcataaagcgtatggtaaaggatttgaatgttgacaccgaaatcatcggctgcccaatcatccgtgaggaggatggactggcaaagagctcaagaaacacatatctgagcgcagatgaaagacaggcagcgcttgtacttagcagaagcttaaaaatcggaaagcagctcgtagacgcaggcgagaagagtgcaaaagcggtaaaggatgcaatcacagcagagataaacaaggagccgcttgcgaaaattgattatgttgatgtggttgattttgacacaatcacaccggttgacgagattaagggaacaacactcgtggcaatcgctgtatatatcggaaagacaaggctgattgataattttatcgcgtagacggacagaaacgattattgaaaagaggtacaaaaaatgaattatacaatgcttaaaggcaaaatacacagagctgtggtcaagcaggctgacttaaactacgtgggaagcatcactgtagatacaaagctgcttgaggcagcgggcatattagagtatgagatggtccagattgtcgatgtggaaaacggaaacagattcgagacctacaccatcgcaggagagccgggatcaggcatgatatgcttaaacggcgcagcagccagacaggttgcagtcggtgaccatgtgatactcatgtgctatgcacagatgacaccggaggaagcaaaggagcatcatccgaaggtagtgtttgtggatgatgaaaacaagatagcgcgtgtgacaaattatgagaagcacggaaaattaacggaagattttatttgatttctgaacagcaacacagcattaggaatatagaaaagtttcgttagtaaacaatagaaaaatcaagtctgctgtagtataataatttatcataaatgaggggcaaaatactttttgaccctcattatcatatcatgtatttatgcgggaggtaaatatgtacacagcagacgaaaagagatacgacacaatgagatataacagatgcggcaggagcggactgaagcttcctgttgtatcgcttggcttatggcacaatttcggggatttttcatcatacgacaacatgaagcagatgtgcttcacagcctttgaccacggtatcacccactttgatctggcaaacaactatggccctgaatacggcagcgcagagaagcacttcgggcttatccttaaggagcatctgtcggcataccgcgacgagctcattatcagctcaaaggcaggctatgatatgtggaagggaccatacggcaactggggcagccgcaagtatctgattgcaagccttgaccagagtcttaagagaatgggactcgactacgtggatatcttctatcatcacagaatggaccctgagacaccgcttgaggagacaatgggagcactcgaccagatagtaagaagcggaaaagcactctatgtcggactgtcaaattatgatggcgagaccatgaagagagcctgcgagattcttactgatttgaaatgtccgtttatcatcaatcagaattcatacaatatattcaaccgtacaatagagcaaaatggtttgaagcaggctgcaaaagagtgccaaaagggcattatctcattcagtccgctcgcacagggcatgctcacggaccgttacctaaacggtattccggaggatagtcgtataaagacagacggacgctttttaaatcaggaaaagctcgctccacacatcgagcagattaagaagctaaacgatatagccacaaaacgtggtgagacacttgcacagatggcactcaagtgggtggtaaaggatgatgacgtgacaagtgtgcttgtcggcgcctcaaagccacagcagattcttgaaaacttaaaggttatggagggcgcaggcttctctgaggaagagcttaggatgattgatgaggttgtgggagtgtagaattgcgcatgtgacgtgctttttgtgaatgtgtgtgaatctgaaaaggtataataagcatagtagcagggagtatagcaacaattaatgctatactccctgctactatattttgggttgcaagaatttagtttatgctataaaatatttataactgtatgcagatatttaataatcacaatatctgtctgtataataaaatacgcataaagaggacgaaagaatgatcaacaaattagtagacaaaatcaagaaaacaaacgcacctatcgtagtaggtctcgacccgatgctttcatatgtgcctgagcacatcacaaagaaggcatttgatgagcttggagagacaccggccggtgcagcggaggctatctggcagtacaacaaggctattgtggatgccacatatgatctgattccggctgtaaagccacagattgccatgtatgagcagtttggagtggagggccttaaggcattccagaagacagtggattactgtcacgagaaggatctcgtggttatcggagatgtaaagcgtggagatatcggctcaacatcggctgcatacgccacaggacatctcggaaaggtacagatcggcagcaagagctattctacctttgatgaggattttgccactgtcaatccataccttggaacagacggtatcaagccattcgtagatgtatgcaaggaggagaagaagggtattttcattcttgtaaagacatctaatccatcaagtggagagttccaggaccgtatgattgacggacgcccattatatgagtgggtaggcgagaaggttgcagagtggggagctgactgcatgggtgattcatacagctatgtaggtgcggttgtcggtgcaacataccctgagcagggtaagattcttcgtaaggtaatgccaaagagcttcatcctcgtaccgggctacggcgcacagggaggcaagggcgcagaccttgttcatttcttcaatgaggacggacttggtgcaattgtcaattcatcacgtggaatcatctgcgcatacaagcaggataagtacaaggatatgggcatcacagcagagaattttgcagatgcatcccgcaaggctgttgaggatatgattgaggatatctcaggagcacttgcaaatcgttaataagttattcagaaagcttaaatatattaacaaacgaaaccagggagataaaatggcagagaaatttgaggagattgcagttgtagttgaccagagctcactcggcaatggcatctacgacctcacacttaagacagacaaaattgcaaaggcagcaaaggcgggacagtttgtatcggtttactcaaacgacaagagtaagctgcttccgcgtccgataagcctttgcggcataaacagagatgatgacaccatccgtctcgtgtaccgtgtgacaggtgaaggcacgggaacagaggaattttcaaagcttgtcaggggcgataaggtaaggattttaggacctcttggaaacggctttacagtacagccgggaaagaaggccttccttatcggcggaggaatcggagtgccgcctatgctgcagcttgccaaggatataaatgcaggcattgtgcagacatcaggtgaagaaaaaaattcgggacaggcagcaatggaaggtgcagaaattaaaacagcagtatgcgatatgaacatcgtcatgggctatcgcgatgagaataccttcctgctagatgagtttaaggagcaggcagcttcctttgtagctacagaggacggcagtgtcggcacaaagggcaatgtcatcgatgcaataaaggagaatgctcttgaggcagacgtgatttatgcatgtggacctatgcctatgcttcgtgcactcaaggcttacgctgcagagcatgatatggactgttttatatcaatggaggagcgcatggcatgtggaatcggcgcatgccttgcgtgcgtatgcaaaacaaaggacaaggatgcccacagcaatgtaaataacaagcgtatatgcaaagagggacctgtttttgatgcgaaggaggtggagctgtaatgagtaatatgtcagtaaatgtggccggtgttgagtggaaaaatcctgttacagttgcatccggcacattcggctccggtgcagagtacagcgagtttgttgatttaaacagacttggtgcagtcactacaaagggtgttgcgaataagccgtgggagggtaatcctacacctagagtagcagaggtgtacggcggcatgctcaatgcagtcggacttcaaaatcccggcatcgagcttttctgcaagagggatattccttttttaaagcagtttgatacaaggattgtggtaaatgtctgcggtcattcgcttgacgagtatcttgatgtggtaaagcgtcttgcggatgagcctattgatatgatggaaataaatatctcatgccctaatgttaaggagggcggaattgccttcggaacagatccaaagggtgttgagacaatcacaagcgagattaaaaaatatgcaaagcagcctgttatcatgaagctttctccaaatgtcacaagtattgcagagatagcaagggcggcagaggccggtggagctgatgcggtttcgctcatcaatacaattacaggcatgaagattgatataaacagaagaaactttgtgttagcaaacaagacaggcggcatgagtggtccggcggttcatccggttgcagtgcgcatggtttacgagacagcacatgcagtcaatattccgattatcggaatgggcggtatcacaaatgctgccgatgctatagagatgatacttgccggagctacggctgtttcagtcggcacagcaaactttgtaaatccaaagaccacagagcagatagtggatggcatcgcagagtatatggacaggtatggagtaaaggatatttcagagcttgtcggcgcggttgacagatagagcataaaggatagacggaggataaaataatgattctggcagcagaatacgtgccttctatgtatgccacagtctgggcacttgttccacctgttgtggctatagttctggcacttatcacaaaagaggtctacagctcattattcgttggaatagtgattggcggactgttttatggaaatgcatttcagccgggtttttcggctgagagatcagtgcttcacatattcgaggatggacttgttggagtgctatcggattcgtacaatgtgggaatactgatattcttagtcgtgctcggtgttatggtgagcatgatgaacaaggcaggcggctcggcggcctttggagagtgggcgagtgagcacataaagacaaggattggtgcccagctttcagctataatacttggagtactcatatttatagatgattacttcaactgtctgacagtaggaagtgtgatgcgccctgtcaccgacaagcatcaggtttcaagagcaaagcttgcatatctgatagatgccacagcagcgcctgtatgcattattgcacctatatcatcgtgggcagccgcggttaccggctttgtaaagggagaggatggcttttctattttcataaaggccattccatacaattattatgcactctttactattatcgctatggtgacacttgttgttttacaggtagatttcggtccgatggcaaagcatgaagccaatgccaaaaagggtgatttgtttaccacaggagacaggccgtatgcggaggcaaagcaggatgttataaagggcaaggggaaggttatagaccttgtatttcctattcttgtgctcataataagctgtatcatcggaatgatatacacaggaggcttttttgacggaacaggcttcgttgatgcgtttgcaggcagcgatgcttcaatcggtcttatgcttggaagcttttttgcgttgataatcaccatatgcttttactcaatcagaagggtattaagctttacggattgctgtaattcaatccctgagggctttaaggcaatggtacctgcaatacttatactgacctttgcatggacactaaagaccatgacagagagccttggagccaaggaatttgtcgcaggcttagtgggaggagtatcgggaccactgcttggactgttcccggcaatcatattcctggtgggagccttccttgcctttgcaacaggaacctcatggggcaccttcggtatactcataccgatagtagtaaatatcttctcgggcacaaaccatacgatgatgatcatctcaatctcagcgtgtatggcaggtgcagtatgcggagaccactgctcaccgatatccgataccaccatcatggcatcggcaggagctcagtgcaaccacatgaatcatgtatccacacagcttccgtacgctgtgcttgtggcaggcatatcatgcctgacctacatcatagcaggctttgtcagaaatccggtagtaccgtttataataggaatgcttatcctgattggaacctttgtcggaatcaagtatatcatcaagtatatcacgagaaccgataaagcaaatgaacaggcggagtagccaaagggagaccaaaaagagttctatttttcacagactttgtgtctgcgaatgatagaactctttttttatggtaagttcgataccggacggacgactgcgcagaatgggaagacacaccgatggtgcacggtcgatttttgacgagccgtgtatgagttatatgcgccacagacaaaaggtggcacggaaaatactcgttcaagcaacacagcatagagaatgatataaaggtaaaaagcgcgtttgattttccgtgccttataaactctgtctgtggcagcatttactcatactaggcgaggagatatgagacagtgtgccatcggtgtgtcttcccatgctgtgcagtcgtccatttgctatcaataaaatttatagcccgctaacaaatattaataaccctaattacatttacaaaaatatcaattagtggtaacatatcaataacttagaaatcatatttgaatggtaggaaatcccagccatacaaactaagcacaaactcataacatactcaaaacaaacattaacaaaaaagaggtaatatcaatggcaaaaattgcaaagcagctcactgagctgataggtcacactccgcttctggagttgaccaattatgaaaaagcccttgggcttgaagcaaaaatcatagcaaagctggagtatttcaatccacttggaagtgtaaaggacagggtggcggcagctatgatagaacagggcataaaggatggaaagataaatcaggacacaataatcatagagccgacaagtggcaataccggaatcggacttgcatttgtggcagcctcaaaggggcttcacctgatacttataatgcctgataccatgagcgttgagagaagaaaaatcgtcacagcgcttggcgcagagataaagctcacaccggggcgtgagggcatgaagggtgcaattgatgaggcgcagagacttaaagagcattatggcaatgcctttattccacagcagtttgagaatcaggccaatccggatatccacagagctacaaccgctcaggaaatctgggaggatacagatggaaaggtagatatctttgtatcatctgtcggaacaggcggcacctgtacaggcaccgggcttggattaagagaccataatcctgatgtaaggatagtagctgttgaaccaaagagctcaccggtactctcaggcggaagaccggggcctcacaagatacagggaatcggtgcaggctttattccaaaggtcatgcgcatggatatagtggatgaggtgattccggtggagaatgaggccgcttttgacaaggcaagagaggttgcaaagagcgacggacttctcgttggcatatcctcaggagcagcaatatatgctgcaacagagcttgcgaaaagacctgagaacaagggaaagaatatcgtggtgctgcttccggatacaggagaaagatacctgtccacaccgctttttacagtaaactaatggcatataaactgacggcataagcttactttgccggaaactgtaacatgaaaaatgagaaacatacatgagaaacatacataaatatacggcagccctgctgtcgacagtgatgattctgtcgcttcttctgacaggctgctcaggcaggaaggatgacggcacagtcaccataaccaatgtgtcgtatgatccgacacgagagttttacgagaaatacaacaaaatattcgagtcttactatgagagcgagcacggcaaaaagataaatgtgattcaatcacatggcggctcgggagcacaggcgcgctcggttgtggagggctgtaatgcagatgttgtcacactggcactcgagcatgacatagacctgatacaaaataccggcttaattgataagggctggattgatgagttttctgacagctcggcaccatacacatcaacaatcgttttacttgtaagaaagggcaatccaaagcatataagtgactgggatgacctggtgagaaagaatgtggatgtgattacgcctgatccaaagagtagtggcggagcctgctggaattttcttgcagcgctaagctatgcgaagacaaattatgacagcctaaaggaacagaaatcgtttatgaagaagctatatgaaaatgtcacaattatggattcgggtgcgagaggctcaacaaccacatttgtggaaaacggtcagggagatgtgctcatagcgtgggaaaacgaggcacttacgaccatggattcatatccgggcaagtatgagatagttaatccgtccgtcagcatcttagcacagccctctgttgctattgtggatgacaatgcaaagagcaacggaacacaagaggtaagcaaagaatacctacagtatctctacagtgatgaggcacagcagctgattggcgaaagcggctacaggccaaccaatcaggatatattaaaccggttttccgacaagtttgatttaaatatcaggctttggagcatagaggattacggcggatggaatgaagcctacaagacatatttcgatgatggagcaatgttcgatgaaatatacggcaactgataaaacagcaaaagagaaaactaaatcaaagaacataaagaccagagtcataccgggctaccatctttcgcttggaatagtggtcacgatgctttcagtcatcgttctcattccgttagcatcagtgcttgtgtattcgctaaagatatcgccgggcgattttgtggcacttatcatgaaggagaatgtgaggaatgcctttatcacaagcatcacctcatcatttatcgcagcaattgtaaatgtggtatttggactcatcgtggcatggacgcttgtgaagtacgattttcccgggaaatggttgcttgacggacttatagagcttccgtttgcactgccgacagcggttgcgggcatcacgctctcaaagctgtactcaggcacaggctttttgggtaagggccttggcaagcttggaatagatgtagcttacacacaggcaggaatagttgtggcacttgtttttgtaggcattcccttcgtaataagagctgtacagccggtgcttgaaaagatggataatacatatgaggaggccgcttatatgcttggcgccacaccatctaagacattttttaaggtaatacttccggagcttcgcccggcactcttaacaggctttggtcttgcctttgccagaggcataggagagtacggaagcgtcatctacatatcaggcaacagtgcaaggcacaggacgcaggtggtatcatacgtcatcatgcagaagcttagctatatagattatgccagcgcgactgccatagcacttgtgatgcttgtcatatcatttttactgctgctatttgtaaacatagtgcaggttaaacagtcacagcgcactaatttgttgtagaaggctgcatataaattaaatgcgatgcacacaaacaggaaaggagcacaatgcgatgaccgaacaggtaaagcttgaaagaagaaaaaagatcacaaagataatactcgtcactgtcacggtgctcttcatatttgtcatgcttatagttccgcttttttctgtgatggcaagtgccttaaaggaggggcttggattctatctgaaagctatctcaacaagctacgtgctttcagcactcaaggtgactttgatagcaacagtttttgcggtagttatcaacaccttctttggaatatggacagcgtggctgttgaccaggttttcgtttaaaggaaagcaggtgcttgcaacacttattgatataccgttttctatttctccggtcatcgtaggacttgcgtatcttatgaccttcggacggcttgggtggttttatccggttatcagatggttcaatgagatattcggcacgaatgtgagaatcacctttgcaataccgggagttgtgcttgctacgatatttgtcacgtttccgtatgtgtcaagggaaattataccggtgctcaatgcagagggaaaggatgaggaagaagccgcagcgctgatgggagcatccggctttacgatatttcggaaaataacacttccgcagatgaagtggagcctgatttatggaatcatactttgtacggcgagagcactcggcgagttcggcgcggtaaatgcgctctcgaagacaagaggcgagacatttacactgccgcttgagattgatgccttgtatatgtcgggcacagacagctcgataacatcggcatttgctgtatcgtcgatattgttaattattgcattaatcattctttttgcaagaaatatagttgagcataaatttaagaaattacactgagatatacttggaaaatacgatttacactaataaaatctgctgcatgggaaaagcaggaaggagataacgtatatgtacgttgagatgaaaaatatatacaaaaaatacggagacttcctggcatccgataatgtgagctttggagtggaaaagggaaagcttgtggcgttgcttggtccgtccggcagtggcaagacaacacttcttcgtatgatagcagggcttgagacgccaaattcaggtgacatatatatagatggaaagcgagtgaatgatattccggcctcgaagagaggcataggctttgtgtttcagaactatgcgctgtttcgatacatgacaatatacgacaatgtggcgtttgggctggagcttcagaagatgccgaaaaagctcataaaggagcgtgttacaaagcttcttgagatgacaggtttatcggggcttgaaaagagatatccgaatcagctttccggaggacagcgtcagagagtggcatttgcgagggcgttggcgccgaatccacaggtgcttttactggatgagccatttgccgcgatagatgcaaaggtgcgaggtgagcttcgtacctggctgaaggagctggtcgaaaagcttgggatcacaagtattttcgtcacacatgaccaggatgaggctgttgaggtggcagatgaaatcattatcacaaaccacggcacgatagagcagatgggtacacctcttgagatatacaagtcgcctgatacaccttttgtggcgcagtttataggacacaccacagtcgttgaaaactatgacaggttaaagggctttgacaggatagaaaatgccgacaaggcggtaatcagacctgagtttatcaagatatcaaagagtggcaacttagaccgctatcagtcagcggcagaggagggcatcgttacagatgtggtattcagaggaaacaggatggatatcacagtcagcataaacggcatcgaggtggtcggtgagcgctcacttgaaaaggacctgatagcagtcggcgagaaagtgcatgtgctgatttacaggctgtatatattcgacgaagagaaaacatacctgatggaaaacagcgagatgcaggagcaggatgtattctacatttagatacaagaatagtctaaagcttgtgattgaaagaggaagcagagggagataaatgaagatagaaaacaaaaaaatcctacacacggacatcctcataataggaggtggcacggcgggctgttatgcagcgctcaccatccgtgagaaatcggattattcgattataattgcagagaaagcgaacataaagcgaagcggatgccttgcagcaggtgtcaatgcgataaatgcatacatagtaaagggcagaaagcctgaggactatgtagactatgcaaaaaaggatgctgacggcatagtaagggaagacttactcatgactatgtccgagggcttaaaccgtgtgacggacaagatggaaaagcttggacttgtcatattaaaggatgaaaacggtgagtatgtagcaagaggaaaccgaaatatcaagataaacggcgagaacatgaagccgcttttggcagaagctgtatcaaagcttacggactgtacagtgataaacagaatcaatatcacggactatatagttgaggacaacaccataaagggtgcatacggattttcaatcgaggatgcgacagcctatgaaatcagggctaaaaaggtgctctgtgcaacaggcggagcggccggtttatacagaccaaacaatcccggtttttcaaggcacaagatgtggtatccgccgtttaatacaggcgccggatatgcgatgggcataagaagcggagctgagatgaccacttttgagatgagatttatcgcactcagatgcaaggacacaattgcaccgacaggaacaattgcacagggagtcggggcaaagcaggtcaattcacttggagaggtttacgagacaaaatacggccttaccacatcagagcgtgtatacggaacggtcatggaaaatctcgagggaagagggccttgctacttaaggacagagggcatttcgccacagcaggatgagtcattaagaaaggcatatctcaacatggcaccaagccagacacttaagtgggtggaggcaggtaagaatccaagtgagcagaatgtggagatagagggcacagagccgtatatcgtaggtgggcacacagcgagcggctactgggtaaataccgagcgtgagactacaatccacggactatatgccgctggagatgtggcaggaggatgtccacagaaatacgttacaggagctatggtagagggtgaaatcgctgcgatagatatggtttcaaagcttgatgcagatacctccgacggaagtccttacacatcggcatttgatgagaaaaaggcgcttgacgcaaaagcttcagagtacgaccatttcctcactgaaaggtctcagatgtttacaacagaggcaatcgaggaagccatgcagaaggtcatggacaactacgcaggcggtatttccacgcattatcagttcaatggcaagcagcttgcgctggcaaaggaaaagataaatcatctgatagagctgaccggtgatttatatgcatcggatatgcatgagcttatgttcatatatgagcttaaggagaggcttacggtatgtctttcggtcatagcacatcttggtgcgagaaaggagaccagatggcacagctttgccgagaatctggattatccgggcaagagtgatgactggatgaaatacgttaattccaaatacgaaaacggacagcttcacatgatttacagagagcttgtcggaagggaggcgcgttatgagcataatgattgataaagcaaagtgtaagggctgtggcatgtgtacaagtgtatgccccggaagcctgatatatcaggactcagagaaaaaagcctttatcaaatatcctaaggactgctggggctgtgcctcatgcatcaaggaatgtcattttggcgctattgctctttatcttggggcagacataggaggcatgggaagtctcatgacagtaaaaagcacaccggacacgctgacctgggatatcaaaaagcgcgacggaagcaaggaagagattcttatcaacaagaaggaatccaataaatattaaagaaaaggatggtaacagacatgggtgaattatcacatcttgacgaactcgaagcagaggcaatatacataatacgtgaagtagccgcagagtgcgagaagccggttatgttgtactcaattggaaaggacagctcggtaatgcttcatcttgcaatgaaggcattttatccggagaagccgccatttccgtttttacatgtaaatacaacctggaaattccatgagatgatagaattcagagatcgcattgctaaggaaaagggcatcgagatgcttgaatatataaatcaggatggcgtaaagcagggcatcaatccatttgatcacggctcagcatacacagatatcatgaagacacatgcgctcaagcaggcgctcgacaaatacggctttacggcagcgtttggcggcggccgaagagacgaggagaaatcaagagccaaggagcgaatcttctccttcagaaatgaaaaccacgcatgggatccaaagaaccagcgcccggagatgtggaagctctacaactccagaatcaaaaagggccaagaggtgcgagttttcccactgtcaaactggacagagaaggatatctggcagtatataaagagagagaatatagagattccttcactttactttgcaaaggaaagacctgttgtatacagagacggcaacatcatcatggtagatgacgacagaatgaagcttcgtccgggtgagaaaatccagatgaagagtgtacgtttcagaacactcggctgctatccactgacaggtggtgtggagtcgacagcggatacacttgatgagattattgatgagacactcagtgctgtttcctcagagagaaccacccgtgtcatagacaacgaggcggcaggcagcatggaaagaagaaagagggagggatatttctaaaatgagcggattacttaaatttattacatgcggaagcgtggacgacggaaaatcaactctgatcggacatatattatacgattcaaagctgctctatgcagatcaggaaaaggcattggagcttgacagtaaggtcggaagccgtggcggcgccatcgactattcactcctcctcgacggactgatggcagagagagagcagggaatcacaatcgatgtggcttatcgttacttcacaacagataagagaagctttatcgtggcagatacgccgggccatgaggagtacacaagaaacatggcggtaggtgcatcctttgcagaccttgcggtaattttaatagatgcaaagcagggtgtattggttcagacaagaagacacgcaagaatctgcgcgctcatgggaatcaactactttgtatttgcagtaaacaagatggatcttgtaggctacgacgagaagcgtttcgatgaaatcacaaagcagattattgagcttacaaaggagcttgaactcaaaaatgtagtaataattcctgtttctgcaacagagggtgacaatgtaacaacaaagtcagaaaatatcccatggtacaagggacctgctcttttatcataccttgaggatgttgacataaaggatgagaacgaggaagagggcttttacatgcctgtacagagagtctgccgtcctgaccacaccttccgtggattccagggccagatagaggccggagaggtaaaggtgggcgatgaaatcaccacactgccaagcaatgagacagcccatgtaaagagcatccatgtgggtgataagctaagcgatagcgcatttacaggccagccggttacaatccagctcgacagagaggtggacgtatcaagaggctgtgtgctcacaatcggttcaggagcaaaggttgcgtcatccatcacagctacaatactctggatggatgacgatgagctcttcaagggaaagaatttcttcttcaagctaggtaccaagtcaataccgggcatcgtaacagagatagagcatacaatcgatgtaaacacaggtgaggaaaagcctgccgacaagcttaaaaagaacgagatagcagttgtaaagattgcattctcggacaagatagtctgcgataagttcaaaaatcacaagacactcggtgagtttatcttaatcgaccgtgtgacggatatgacatctgcctgtggtgtggttgaagaggtacacacagaggaaagcggcctctatgagggcagagtagacagaaacgtaagagctgcaatcaagggtcagaaggcaatcaccgccgtattcgtagacggagtggatggtgtaaaccgcggatttgtggaggatgtcgagaaagccttaaatatagacggacgccatacttatctctacgcaccaaaggagggtgaggacttcgtaaatgtagtcaagcatctaagccatgccggaatactcgtacttctgctcatcagccaaaagcaggagaaggcgcttgaagccgacaaagttgagttcacaaaggactggaacaaaaacggcagagatgtggacaaggctgcggagtttatcaaaaagcagtcagtatatgacggcgtgattgtaaacacaagtgagtatatctgataaaaatatataagcagatgaacagcatcccatattcatttaatatgaagggatgctgtttttgtaaccaatttccacgttgaaaagcacgccccaatgtggtaaaattgacaaagataatttatagaaaacatacaggaggattaacatacaatggaaagttacaagagcgaatttatagactttatggtggagagtgacgtgctgaaatttggtgatttcacattaaagagcggccgtaaatcaccatttttcatgaatgcgggagcatatgtgacaggctcacagcttaagagactcggagagtactacgcaaaggctatccatgctaactacggagatgactttgatgtattatttggacctgcatacaagggaattccgcttgcagtggtaacagctatcgcataccatgagctctatggcaaagaggtgcgctactgctcagacagaaaagaggcaaaggatcatggtgcagacaagggaggcttccttggaagcaagcttaaggatggcgacagagtagtcatgatagaggatgtcaccacatccggcaaatcaatggaggagacagttccaaaggtaagaggagctgcagatgttacaatcgtaggccttatggtgagccttaacagaatggaagtcggacagggcggcaaggtaagcgcgctcgatgagattcatgagaagtacggctttgagggcagggctatcgttacaatggaagaggtcacagagtatctctacaacagagagcatgatggcagagtagtcattgatgacacaatcaaagcagctatagatgagtactataagcagtacggctgcaaataggagaatataaattgcttggcagaagaaaacgtaacaggtataagtttacggaaaagaagcaatctaagagggggatagctgcacttgttgtggctatcctcatagagattgtatatatagtttttttgaatgcggcattcagaggagatggcaatctgtctatgtactatggcagtgccggtatactgatgcttggcatatctctggcagatttcgggtttgccatcagaagcctctttgatgaggaatcattcatgacgtttccacgactggcagtgtttttttcactcatagcggtaatcagctggggaggaacatatgctgcaggttttattatatgaaagaaagattatagggatatatgagttataaagagatttatgagctctccaatgagctttacgcagagcgattagagcttgtggaggagcggatagaacagatcgtcagagagcctgcgatagagccggcttttgcagattatttcagaagtgcggcaaagtgcatcaacactataaaaaaacatagcgcagataaggaatttaacgatttattctattcacagtttgataaagaaaattacgagaaaagctatgccaacccggcatacgccgtaaaggtgctcggagatgagtatggtcagcttttatcggctgtatatgcaaaaattgccggaagcattacacatatctatcagggggatataaagtatctctgcatttatgcagagcttattgtagagctttacaattattttgagaatgctaatgagctgagtcctgatgagataaggggctgtatatattcgtttatgcatgattatgaggagatttttgcagaggatgacaacagagcactccttgacccggcttatgattactatacagagattgtaaatgaggcagatttgtcaaatgatgattatctgtattcttacggactgtatgtcggagagaatgagcgcgccggcagagcgcatctggcttcattttcagatgaggagatacaggccatggcagatacctatacagaaggataccgcattggctttattacctgcaacaaggatatctcaaagaagtcggtggttcaggtgctttatccgctaggctttgagcgtatgataagagcagcattaaaaaatttcgagaaaatgggtatgaagcctgccatgagaccattttccacatcggtcaataagcagtttgactatgaccacaaggaggatatggcactgtggcttgacaaggcatatgtggagtatcgtcttgagtgcatgcacaatgcacttgagagaatgaaggatgtagcatgcaaatgtggaggaccggctgtcatagagatatttggagaggagccgtttgctccggtttcaaagaaggaggctgcgcactttaatgatgagcaacagaagcttgtagtccatatgacaagcgtgcgctcacagtatatgaacagctatatccacagcgaggacagaagctttacgatcatcgcctatccgtgtgctgcaatcggacctgattataaggaaatttttacggagactgtaaagattaatactcttgattatgcactctacagggatatgcagcagaaaatcatagatgtgctcgatacagcagacagggtacatatcgtcggtacaaacggcaacaggacagatttgtatgtcaagattcatgagcttaaggagccttcgaaggagacggcttttgaaaactgtgtggctgatgtaaatatccctgtcggagaggtgtttacttcaccggtgttagagggcacaaacggtaagctgcatgtcagtcaggtatatctcaatgagcttaatttccttaatctggaaatcgactttaaggatggcatgattgataaatatacatgcaccaattttgaggatgaggaagaaaacaaaaagtatatatcagacaatgtgcttttccatcacgacacactgcctatgggtgagtttgccataggcaccaatacgacagcctaccgtatggcgagagtatacgatatcgcagcaaagatgcctattctcatagcagagaagacaggaccgcactttgcagtgggtgatacctgctacacatacgatgaggacaatatgacatacaaccctgacggaaaagcaatcattgccagggataattcagtttccatcagcagaaaagaggatatatcaaaggcatatttcaattgccacacggatatcacaataccatatgatgagcttggagccatcacagttattcgacacgatggctcaacatgtgatataataagagatggcagatttgtgcttgagggcgtagaagagttgaacaaaccgctcgatacgcttgatgcagaaagtaaataattgttagacatataaggaggataaaatggcaaaggttggaatagttatgggcagcgactcagatttaaaggtgatgagtaaggcagcagatatgcttgaagagctcggcatagagtatgagctcaccatcatctcggcacaccgtgagccggatgagcttattgagtggacaagaggcgctgagaatagagatgtaaaggtaataatagcaggagctggaatggcagcagcacttccgggaatgtgtgcagcgctttttgcacttcctgttatcggagtaccgctttcaggaaagaatctggatggaatggatgcagtgttctcaatcatgcagatgccacctggagtgcctgttgccacagttgcaattgacggtgcgaaaaatgcagcaatccttgcagcaaagatactcgcagcaggtgatgatgtaatccttgagaaaatcaaaaagtatacagcagatatgaaggctcaggttgtagcaaaggatgcgaaactgaaacaggttggatataagcagtatcttgctgaaaaatagattgtattgtcatctataggagggtttttatgggtatattgcaaaaggcagacagttgtatggatgaggcagcagccttatttggcgagaataagctttttttggcagagaagaaggcacaggagacagccggtctttataagagctgtggcgcatatgagcagatggcaaagactgtcaatcttatgggagtcatatatgcatctattggagatgtaagcatgtcgattgactgctacctggaggctatggatgtagctgtggagcagggctcaacagagataataatgcttgttaacaataatataggctcactctatatggagcttggattgtatgaaaaggctatcagatattttaacgaagcactggagctgtgcaagccaccactgcatggagagagggatagctattatcaggagcttctcatgcttcatctgaatctgtgcatatcatacacaggaattaatgagtttgaaaaggcagaaaagcatctttctgacgcgatactccttaatgatatagctggcagtgataaaaacagatttctgatagacatgtcacaggcacatctgctatggaagatgggaaatgaggatgaggtcagagatcatgtggaagagctggttgagggtgcgataaacaatatcgattctgccgattatgtgcttgagatactaagtctttgcaatctatttatgaatatgggggagttcgatgcatggaaaaaggttattgtggagtatgaaagatttgccactgatacgcaaaatctgtttttccagaagacctgtgtcaagatgtggatgaaatatgagagcgccattggtgatacagaggcgtacaacaagctgtgcgtatattacgcaaatctccactctatgcaggtgaaggagcagataaagcgtcttggtgatacaatagaccttaagcttcagcttcaggagactgagtatgagcgccgtaaggcagtcagactcaactacacagatatgcttacaggcatgggcaataagttcaagatgcgaaacgattttgaaaagcttgtgagcaaaaatcaggattcagatggtgcaggaatcacgtttggagtagtggatatagatttcttcaagtcatttaacaaaaacagtggcagagtcaccggtgatgcagtgctaaaagaagtgtcatccataataaatgagagcgtcagagataatggaatggggtatcatttctatggtgatgaattctacataatcctgcaggaaacggatgaggatatcattaaaaatatagccgagcatataagacttgagcttgccaaaaaacagatacttcatgagagctctaaggtggatgagtatctgactgtatcacaggcatatgttaccgccccggatgtaaaggtgccggatgagttttcaaagctgttcaagacggtggatgaagtgctcaatgatgtgaaggaaaatggcagaaatgcatataagatagtctgatgctttaagcgtataagacaactataaaatgacacgcagcgtaaaacgttgcgtgtcatttttaatggatctatatatacagttatatttatagttatatttgtaattatatttttatatggctatattgtccatttatattccggatataacaatatctgtgcctgccttctcatatatatctgctgtctcaggagagataccggagtcggtgattaccatattgatgtcatcaagcgatgcatagcttgatatggatgtggtatcaaacttggtgtggtctacaagagccacagttttagcggaggccttgatacacatgtgctttaaatcagcctcgtatatactgaaatcagtcagtccgtcttctacagagaagcctcttgctgacacgaacgcgatatctgtgtgtatctttttgagtaaatcagcgccaagcagtccttctatggaagcggatgcactggttacgataccgcctgtcaggatgactgtgacacccgggatatcctttagctctaaagccagattgatgccattggtgatgacggtcagctctgtaaagcctgaaagcttcatgccgagagtgtaggctgtggagctggcatcaaggaatatacacatatggtcacttacgagctttatcgcctcgtttgcaatctcctctttagcttccttgttttctagggcgcggtcatggaacaggtaggccctcgaggttaaatcagtcatgtcatgggttttatccttgtagatagcaccgccgtgagtctttgtcagaagcttttccttatccatctggtttaaatctgttcttattgtcgtggtcgatacaccaagcagttcgctgagctcattggtggtggccttgcggttttcttttaaataatcgagaatcttttgttgtctttctaattgcagcatagattttcctctttcttttgatttctgttgtatttttgcgtacatatttttatcacaaagcattgcataaatatataataactcaaataagtaaataaagccagtgttttcgattgcttatgcttttttaatttgatgacatttaattatatttatttttacttttatttgcttttactattgcattttttcttttaaagtgttatatttatatcatcaaataaaagcaaacacaaattatataaggcggaggtattattaaatgaagtttttcgtagatacagcaaatgtcgaggacattaagaaagcaaacgatatgggagtcatctgtggagttacaacaaacccttcactcatcgcaaaagagggcagagacttcaacgaggtaattaaagaaatcacatctatcgttgacggaccgataagcggagaggtaaaagccacaacagttgatgcagagggtatgataaaagaaggacgtgagatcgcagctattcatccaaacatggtagttaagattcctatgacagttgagggacttaaggctgtcaaggtgctttcatcagagggcatcaagacaaacgttactcttattttttcagcaaatcaggcaattcttgctgcaaatgcaggtgctacatatgtttcacctttccttggcagacttgatgatatcagccagccgggcattgagctgatcagacagatttcagagatttttgatatctatggatatgatacagagattattgcagcttcaatcagaaacccgattcatgtcacagactgtgcacttgcaggagctgatatcgcaacaattccttacaaggttatcgagcagatgacaaagcatccacttacagatcagggaatcgagaagttccaggctgattacagagctgtatttggggattagatattataaaccaaagacaggtataaatattttatttcatgtcatagatttaacaggagaacaaaatgaacaaattagagcttcagattacagcaaatgaagtcaggaagggtatcgtcacggctgtgcattctgcaaaggcgggacatccgggcggctcactttctgcagcagatatatttacatatctgtattttgaggagatgaacattgatccaaagaatcctaaaaagccggatagagaccgttttgtactttcaaagggacacacggctccgggactttactctacacttgcgcagagaggctattttccggttgaggatttaaaaacactcagacatctgggatcatatctgcagggacatcctgacatgaagcatatcccgggtgtggatatgtcaagcggttcgctcggacagggcatttctgcggcggtaggaatggcactttctgcaaagcttacaaatgatgattacagagtatatacacttctcggcgatggcgagattcaggagggacaggtctgggaggctgccatgtttgcaggcttcagaaggcttgataaccttgttgttatagttgataacaacggacttcagattgatggaccagtggatcaggtgtgctcaccatatcctattggtgagaaattcaaggcattcaatttccatgtgattgatctgaaggatggaaatgacatggatcagattgctgacgcatttaaagaggcaagaaatacaaagggtatgccgacggcaattatagcacataccgtaaagggcaagggtgtttcatttatggaaaatcaggtcggctggcatggcaaggctcctaatgatgaggagtatgcagttgccatggaggatctgagaaaggaaggtgaagcattatgtcagaagtaaagaaaatcgccacacgtgtcagctacggaaatgcacttgtagagcttgcaaaggagcacgatgacgtatatgttcttgatgctgatcttgcggctgccacacagacagccatcttcaaaaaggaatttccagatcgtcacatagactgtggtatcgcagagtgcaacatgatgggcattgctgcaggacttgcggctacgggaaaggtgccatttgccagttcatttgccatgtttgcggcaggtcgtgcgtttgagcaggtgagaaactctattggatatcctcatcttaatgtaaaaatcggtgcgacacacgcaggtatttcggtaggagaggatggagctactcaccagtgcaacgaggatattgcactcatgagagcaattccaggcatggttgtaataaacccaagtgatgatatagaggcaagagccgccgtaaaggcagcttatgagcatgagggccctgtatacatgaggtttggccgtcttgcaacaccgataataaatgacaatgcagagtataaatttgaaatcggaaagggtgttacactccgtgagggcacggatgtagctatcatagctaccggtctgtgcgtggcagagtcacttgcagcggcagaaaagcttgcagcagatggcgtaaatgcaaaggtcataaatatacacactatcaagcctcttgatgaggaacttgttgtagctgcagcaaaggaatgcggcagggtggttaccgtggaggagcactctgtaataggaggacttggagccgcggtatgtgagacactttcgcgtaaggctccaacaccggtaaagacaataggcatacaggactgctttggtgagtcaggtccggcggtagctttgcttaaaaaatacggacttgatgcagagggcatttatgcatcagtgaaggattttttataagtatttaaaatagtttggttttatcatttttcttattttccataatataataataaactaataaaagaaaggacagccgggatacggttgtcctttcttatactttgtatacatataaaaactttaatgttttaattaatgtaaaataatttgataagatttaaaatatatattgtgttataggtttttatctgatatattaaatctataaatgatggacgacctgtgttttcgtataactgataaggcaaaaagaaaggggacatcacatggaactgatatgtaagaagtgtctgcttagagaaatggcagaggccgatgcagcaatgataaaaaaatatgttgatgcgataaagggcgaggacagagtgccggaaaaagagtatgaggcaaggcttgcagtgtgcaaggcgtgtgacaggctaaatgccggaacctgtaatgcatgcggctgttatgtggagcttcgggcgcttacaggcgtttcgcactgccctcataaaaagtggtagtacaaataaaataataacaaaatgactgcggttttgatttccgcagtcattttattattatttagtgtttttttcagtgtcaagaggtgcataattgatggatacaacaatgtcctgatcgtagttaccgaagctttttccgaatattgtgagtccaccgacatgggcagaatcctcatcgacagctatgcggaagcgtatggtgcttgtgtagtcaagctttagctcagaggttgtgatatctgatatcttaagaccgtctatgaaggtgcctttatgatttatgactaaaagcttaagtagaccgtattgattccagttctgaggccaccattcaggggtgaacattccgcgtacatctccatagtcaccgggagaggtccaggtgccgaccagagtgtcatttatgtaaaagcttatatcacttggccagtcgttgtcggtgcccggagcctcagaacttatctcggctgagagtgaaagctgggtgattttctgattacgtggaatgaggtttggaattacatattccacatagccctttgtgaaccacataatgtctgcattgaaatggtcaggatggtcaaagtaacgcacgtcatcaagctctcctatcacaaatgaggatgtagccaggccacaggttggacagatattgtgagatgaaaactgccctaccttgatggatgtgttgtatacgttatttaagtctattggtttttcaatttctactaatatacgatcctgaatcagtgaacacagcttctggttgccgtgaccggatgaatcgtttgaggcggagataagtccacactcctcaagcttttttatatgtccggttaaagctccattgctgatgtttagctcgtttgcaagctgattcatgctcatctggttattctcgagcagaatttttaaaatctggatacgaatatcagagccgagagctttaaacagttcgagaccatcgtctaatgatgtgatatgtatcatatatagattctcctaaaatattttataaaattaacaacgagtttttgtgtgtaaatcatgttttaattataggaataagctcctatgttgtcaatatattattgtatagttttaagctttattgaagcatgttttaaaataatttaaatatattgtgcaatatgtataacttacatgcgtttcaaaacgaaaataaaataaaattttaggtattattaaataatgcgtaaaatagtttaaaataatctaaaataaatattgacattgcagctactctcatgtatattatgtgcataagcaaaacacattaacaatcagtgcacttatgtgtgcaacaatggcagagcaggataaatgtataagagataaaggagaaactatggcaaaaattattgtaaataatgagaataaaaagagtacaattgctccggaaatttatggacatttttcagagcatctcggaagatgtatctacgagggattatttgtaggggagaattcagatataccaaacgtaaacggcatgcgtactgatgttgtagatgcattaaaggaaatgaagatacctgtgctccgctggccgggtggctgctttgcagatgagtatcactggatggatggtatcggtcctaaggagaagagaaaaaagatgatcaacacacactggggtggtgtggttgaggacaacagcttcggaacacatgagttttttgagctttgcagacagttgggctgtaagacatatgtgaacggaaatttaggaagcggaacagtacgcgagatgagtgagtgggtagagtacatcacatttaacggagtatcacctatggctgatttgcgtaaggaaaacggacacgaagaaccatggactattgactacttcggagtgggaaatgagaactggggatgtggtggaaacatgcgtcctgagcattatgcagatgaataccgcagataccagacttatgtcagaaattatgcaggcaatcagccaatcaataaaatctgctgtggtccaaatgtggatgactatgagtggacaaagaaggtgatggctacatgctttgatcattgtgagcctagatcccatggcctgatggatggattatcacttcattattacacacttccggagacagaggatgactggaatatcaagggaagtgcgacaaagtttactgaggatattttttatcagactcttaagagaggatatttcatggaggagctcatcaatcgtcatggagctataatggatgagtatgatcctgataagaatataggtcttattgttgatgagtggggcatctggtcagatgtggagcctggtaccaatccgggattcttatatcagcagaacacaatgcgtgatgcacttgttgcaggtatgacattaaacattttcaacaagcattccgaccgtgtgaagatggcatgtattgcacagcttataaatgtgcttcagtctgtaatgctcacagacggcgataagatgataaagacacctacatattatgtattccatatgatgagacatcatcagggcgcagctcttttggacagctctcttgtaggaggagctactgttggttcaggaaagaatgagcttccgaaggtttttgagtctgtatcagaggataaggatggagtgatcacagtcacacttacaaacaattctcttgagtcgtcagaggatgttgatattatgctcacaaatgagggtgacaaatacagtgtaagtgaggccagatacatcgaaggtgccatggatgcacacaatacctttgaagcacctgaggtagtggatgagaaggatttcacagcatatgaaaatacacagacaggtgtgaaggttactcttccggcatgcagtgttgttacacttagattatcgaaataatattaaaacagctattcagaatcacggggaataaaaagcaggtttttctgttcctcaagtggttctgaatagttatgtattaaaagaaaaatcgctttttatgatgcttgcaaatattggttggtcaattttgatggttgaagtattttatatggagagagtagaatatggatttaaagaatataaaaatagaggatccgttttggggacatatgcaggagcttgtgacagatgttgtcattccgtttcaggaagacgtgcttaatgacagacagcccggagtggaaaaaagtcatgcaatagagaattttaagattgcagcaggcctttcacagggcgagttttacggtatggtctttcaggacagtgacgtggcaaaatggcttgagggagtggcatattctctgataataaagcctgatgctgcgcttgaaaagagagctgatgacattatagatattatcgccgcagcacagcagccggatggatatctgaatacatatttcacaataaaagagcctgagcacagatggcagaatctgcttgagtgtcatgagctgtactgtgcaggtcatatgatggaggctgctgtcgcatattatgaggctaccggcaaggataagctgcttaaggttatggaaggcatggcgggacacatcatagacagattcgggcctgacaagctgcccggaataccggggcatcaggaggttgaaataggtctgatgcgcatgtatcatgcaacaggaaatgaggcctacaaaaagcaggcgagatattttcttgaggagagggggaaaaatcctgctttttttgctgaggaagccgcaaagcgtgattggaatcattttggaatggttcctaaggatataaagtataaccagagccatgctaccatttatgaacaggaagaagcggtaggacacagtgtgcgtgctgtctatatgtatacagccatggcagatctggcagcaacggagcatgatgaaaagctttttgctgcttgtgagcgactgtggaataacatgacagaaaagaagatgtatataacaggaggtataggctcaacagtggagggagaggcctttacgaaggagtatgagctgccgaatgatatggcatacgctgagacctgtgcatcgatagggcttgttttctttgcaaagcagatgcttaaaataagcaaaaacggcaaatacgcagatgtcatggagagggaattatacaacggaattataagtggaatgcagcttgatggaaagagatttttttatgtgaatccgcttgaggtaaatcccggagtatcaggtgaaatatttggctataagcatgtcattcctgaaagaccgggctggtatgcatgtgcatgctgtcctccgaatcttgtgcgtatggttacatctctgggcagatatgcgtgggatgaggatgatgatgtaatctattcacatcttttcatcggtcaggaggctcggcttaaaaaagcagatataaaggttgtcagtgaatatccgtggaagggacatgtttcatacagcattacgccgaagacaggcgatgaatttgctgttgcaatacatattccgggatatctgaagagctttgaggtgacactcaatggcatgaggttaaaagagaatagtgaggcaaaagcagatgtgttctattcttatagggatggctatatttatataaaaaataaatggcatgataacgatgttatagaaatcagcttcaatatggatatccgtgtaatatatgccaatacaaaggtaagagaggacataggatgtgcagctttgcaaagaggtccggtagtgtacgcttttgaaggagtggacaatgatgatgatgtgcagagtctgatgatagatgtgtcaaggcttaatgaagcacagattgaaacagaagctgagggaacattaaagggtgcggttcttttagatattcctgcagtgagacttgaaagctcagatgcgttgtattctgagaagccacctagacaaaagtctgtaatagcaagggctataccatattatatgtggggaaatcgaggacttaatcagatgagggtatggatgcatactatttacaattaaaatatagctatgcttaataattaaaatcccgggttgtctgtcacactaaggtgtgtacggacaacccgggattttgccggttgtgaatgatacaaaaatgcagcggctttttgtgtggctttactacatgttttaatgcataaggctctcttatagtgcctcctgaagtatcttcacatcccacttattcatcacatcgccctctttagctgcttctccggtgatcaggtcaaccattcctgcaaggcttgcagggagagtatgcttttcatcagtgaaattcatcacaaagtaaaagcgtgtattttcgctctcgcggcatgtgatttcaagacctgtcttttcagcaatgacacctgatacagacacttcatctgtggcttcatcaagcacccttgcaagtccggctgcctcaagctgtgtggcaacatagtatacatggccttttccgtagatgttttttgtgacagcaggcattcctgcatagaaatcgctttcatatgtggcgagtacttctgcaccttccgagtgcatcaggtcgcacagcagattgcatttatattcttttccgtctgaaaagcttacagtgtttgaatgctcaggtgcgagcgcgtcaatttcctcaacccagacacctgccatctcgcgaagaggtcccggatatccgcccagatgcacgttgtcagactggtccacaataccactcataaatgttgtgatgagagtaccgccgtttttcacaaactgctcaagcttttccttcatcccttcctttaccatgtacagaacaggtgcggcaatcaccttatattttgaaaaatcaccgtcaaccggaatcatatcgactgagatatttttgttgtaaaaatactcataatattggtgaatctggtcaacatatttaaggtcctgtgtaggtccgcttgtgtactcaagtgcccagtaattgtcccagtcaaagatgattcccacatctgatttattacgtgtgccaagtgtccttgtgccgaagctttcaagttctcgtccaagctgtgcagtctccttaaatacccttgtgtcgtttgttccgacatgtgctattacagcaccgtggaatttctcgcagccacccttgcttcgtctgagctggaagaactggatagtgtctgcaccgtgggctatggtctgatagctctgtgcacgcatctgtcccggacgcttcaatgaattgtagtgctgccagttctgctggcttggagtctgctccatgagcatgaatggctcatccttaagacctcgcatcaaatcgtgagtcatcgcaaccatgctccatggtgtgtcgtatgcagggtaattatcccacgacacgatatccatctccttagcccacttgaaatagtcaagacccttgaaggtacccatcaggtttgttgtgacaagtgcatcgggaatgatagcttttactgcatcgcgctccagcttatagcagttcagcatgctgtcagagtaaaaacgcctgtagtctgttgatattcctgcaaagcttgtcatgccaccccaggtctcctcgctgagctcgttaggtacgactatctcatcccagtcatagaaggtgtgtccccagaactctgtgttccaggcatcatttacggcatcaagagtcttgtacttatccttgagccatacacgaaactgcttctggcagttgtcacagtagcagtatccgccgtactcattattgatgtgccatacagaaatatttttattgccgctatagcgttttgcaagctctgtcgcaagagcctttgcgtacttctgatataccagggagttcggacagaaattgtgtctgactccaaatttatgctggcgtccctcgtagtcggtgctcatcgtatcaggatattttttgaccatccatgcaggcagtgctgctgtggatgttgccatgacgatgtcgtagttttcatttgagagcatatcaactatctcgtcaagctctgtgaaattatactcattctcagaaggctgtattttagcccatgaaaaaacgttgattgtggcactgttgatatgggcatccttaaagtatgccatgtcctgctcccagacctccctaggccactgatttggattgtaatctcctccgaaaaggattcttttgaattttgactgcattttttacctccgttatggtattaaccccaatattatgatatgagggtcaaaaggtattttgcccctcatttatgattaatcagattactacatgctacgcattcccgtaatctgactacacctcgaaatccgctaatttcctgcgttcccgcagcaaattgctactttctcggtgtagtgcgggtcactaaggtatacatcgaattgcatgcaagcatgcatcgatgataccttttgaccctttaatcatattatgatattcttaaactataagtgtgtttccttatgcactaatcatataatagatttacggaaaatagtataacatcataaaccaaattatataacattctgaaactaaaccgtttttgaaaggagaaagcatgcctatttattttggaagcaatttcgcaagagaaccgtttcaattcgactctgtcggtaatgactgggagcaggaaagcgtgacgcgcccggaggggtatccgctgtaccattatttacagacaaaggagggggtgggtgaggtgacggtatacagcagaaatcaggctgtttcagacaatattttgttaaacagtcatacgattgagctgcaaaaggggcaggggattcttattgctccaaacgtgccacactcctatcacaataaaaacatctcatccggcaatagcctgccctggaaaacagagtttgccacttttacagggacaatggcggcagccttcagggaaatgtttgatgaaaaggaataccggctgattgatgagaataaggggatggaggtgtcggaagcgattaacagggcagtggaagactttaaggaacgttccagtgatacgcaaatgctctcactcgactgttatggcatcatgcttttgctctcagaccagtctaatcacacacacgataatgatgaccaaagctatgtgcgttttataaagcctgttatagatactatagaagaaagctacatggacgatatcagcgccaaggagcttgccgatcgtgtatttgtatcgcagcaatatctatcgcgtgtttttacggagtttatgaactgctcggtgtatgagtacctgacaaactaccgtatcaataaagccaaggaattactgcttataaacagcaggcgcaaggtgcaggatatagcatctgatgtgggatactcagatgccagccattttatcgtcatgttcaagaaacttaccgggatgacaccggcgcagtttcggaaactgcatatataaggggatgcaactgtttcttgtatttaatagggtttgatgttaagatatatttatcagaaatatggtgcgaaaatgaatagctacaattgttttataagaattaggaagtgataatatgagtgatagaaaccggatattatgtgagttcagaaataagacaaaaagcattatgggtgattcgttaaagcagatgatattatatggttcatatgcaagaggagattatggagataattcagatatggatataatggttttgacggagctgacggatgataggattatacagatagaggatgaaatatttgatgcagcttatgatattgaacttgagtatggtgtgccgataagtgtgaatattaaaaatgaaaaacactttaaaaattgggtaaacagcttgccgtattattcaaatatacaaaaggagggaattattattgcttgaggaaaattgtattagtttagcaaatatagaatggaaacgtcaatggaaactttaaatgttgccagggagtgtttagaaaacaaacattttaaagattacaggagttcgctccactattagaggtacaaaacaagttcagtccatacagaaatgcgcaaaaaaggcaatcacataaaaagttcgtgattgcctaattttttagcgtttactgttttaaggttatgattgtatggaaagtaccggaatcattatcataatacatttgcaaatttccgtgatattgtttcacgacttttttaatactcttgattccgaagccatgtctgcctttgtttgatttatgagatacaggaactccatcctgatcgtacacaggtgtgttttggcaggaatttatgagtatgataataataaaaggtgaattttcctttttttctacggtaagctcaatataagaatcagggatgttatctgctgattccactgcattatccaataagttacagaataacgatgtcaaatcgtgctggtaaatattttgaacagtatcacttctgatatcagtatgaaaaacaatgtgcttctcgttgcattgccgttgatagcggcagagaattgcattcagcatttcattatcgcagatttttgaggtttcttttaagtcagaagattccaaaagctgttgtatataagcatttattttatcagaatcatttttttcattgagtaatttgatagattgaagatgtttttttatatcatggatcagaatactttgattttcattttgcgaaagcatcatttcatagtattgggcggaatccgattctttctggagcaacaactgcatatcggtatattcctgtgattttttctgattatattggttgatgccaaatacaagcagattgaccatcagcaaaaaaacagcacagattgttaccataaaatcaacaggttgggcaaaggctgatgtttcaccaatagcaagaaaagtaaacataataaaaacagacgaaaccggaattagcattaaaagaagtcctgagcgatcgtactgttcctgatttatattttttcctttgagcagatgaattaataaatagatgactgcaaaaaataaaatcttgctaaaaaccgtataaaaaataattccggcatctgtttctaagacaaaatgcggaaaaaaccttgatataattccgaaaactgcaagttcagatagtcccataattgctgtaagtatggcggaatggaatagtgccaataacaacttgagcttaaacaacatataaagaaaaatagtgttaatcacaaaaaaactgatggcattaagccctgtttgtcctagcagggaaataagaaacaatatagcataaaaagcactcaatagtgccagttttattttattgctataagaagaggtaaaaaggctggaggcgtattgccataatataaccgcttctgtaaaaaagctaaaaaaaagtaaaatgatatgttccatctatttttacctcatactttccagatatagtagataagcatttttaaatgaactgtatttcctgcgtgtcaggtaggcggtaatctgctgattcgataaatgtatggttgaatgatcaaagtctacaatatgttcgaaattaacaataaagcttctgtgtgtttggaaaaagctgtttttggggagatgttccagccagtagtccatattatgaatggagtcaaaatcctgccgggcagtatgtacaattacttttcgttcctgtgcttctatggcaatgatttgagaagcgggaaacgaatacacaccctgtttagtttcaacaggaattttggtagtaatggaattgtaatatgttaaggcatctttcatatttcggaaaaaacgctgtttgtccaaaggcttggaaagatagcggaatacatgaaaacgcattgcctcatccagatattcggaatatgaggtcaccacaaaaataaggacatttttgtttgctttttttaattcatttcctacataaattccattcataccgggcatttcaatatccagaaaaacaatatctttttcgtttttatcagccaataaagattcgccactggtaaaggaaactaattcgggacattttaaatggtttgattcaaagtaggattcaatatatttctgtaattgttctattatcagagtatcgtcatcacaaattaaaatacgcatttttgcacctggctttctaatgaatgtatatttacatacatcttatcatatagaatttccaaatgcaaaaaatgcgtatgaaaagacattttaattacaattttggttcattatgtgttttgttatttcgttttacaagcagttcgataaagtctccggcaagttctatgtcggattgattacataaccgtagtttatcaataatatcctgtggaatattataagcatgcatgctgccgagcagaaggtagtctggtgtaacattgagtagatcacaaatccggatgaaaatatccagacttggtttttgccttccgttttcgattgatgacatatggttattggatatatttaatttttcggcaagttctgcctgttttattcgtaattcttttctgcgtattttgatgcggtttcccataccttcatattgaaattctatttattccaccttctttcagtagaattttaccaatagaactaaataaaaaagaagaatgtaacaaagaactattctgccacatattgaataaagtataatttatatataaataattctgtatcacatattattttacgcggaaaataggaagattattccaaaattgaagagaatcattccgttcattccgaagggctcgtttatttgattaaagtggtatatgattgtttatgtgaaaatcaatgataatctttaggaaggagagaggacattatgaagaaacgggtaactaaatcggttgcaaaagggatgaaagcagcattagatgttgtgctacagactgaagctaacacagcttcttgtattattatgtatcagcctaaggcaccgaaagaattaatgaattacaggagaaacaagtaatggaaaaatgtacagatacagtagttgattggatgatccggtgtaatgtgataaatgaagcagataaggaactttacaagtatgcattacatagcttgctgctattggtatcaccacttatcctagctggaggtattggctttgggttgggaagcgtaaaacacggagttgctcttatttttccgtttatgtttctgagaaaatttagcggtggttatcatgcaaaaaaattgcacacttgtattatggggtctggttttctactgtttttgtgcataatggtatcaatgcatatgcaatgcgattggaagttggcaatagctacaggtattgcatctgtgagcctgattgcatttagtccaatagacagtgaaaacagaagacttgatactgacgagaaaaggacatataaaaaaataacagtattttgtgtgatatttttcggactgttagatatagttttattcttgttaggaaagtacatctatacaatctgtttttctgttggaatattattgacagcaggtttacaagcaccttacatcgtaaagaaaatgcgtaaatcgaccaaaaatggactgtaaatgtcgtttggtgcaataggggttgaaatcatggcaaaaataaagataatgagagttgtcattggtttcacaaaaaaagaaaaaaggaaaagaggtaataatcatgttaaaaaagaaattagttcaggtaacagcagcagcaatggcagcaaccatgttattctcagtaccggcaatggcaaagaaaaatttcttttcatttaacgtaaaaacttcagttaatgacggagaagctttttcagctggtaatcataaaaatgatgcggaaagacaagcttacgttgtaactcaggacagtaacatcataagcacagatgcgttttattatgccgtatttaactatccgaaagatacagctcggtatcagtatgcttatcatacaaaaatgagttcaagaactggcacagttcatccacagtattataaatcagttactgcagggcagacaatgtatttacaggcagatacggacaaatatatcgtttgggcagatggatactggttctcataataatggattacatgtgcagcaaaatatcatttaacaagcaatcgtacaataattatgtagcataattgcgtaaacaagggggaaacaaaatttttaaattggttttcccctttaattgaaaggagaagaggattagtgaaaaagaaaataagaaaaattgggatgttaagtagtatagcattgatgatatgtttgggggtgaccggatgttatccggacggaaaagtatcattggaagaaaaaaaagaaacagatagtaaccagattaatattgatgaaaatgcttcgcatattgaaggcaaattggatgagggattatttgtgaatgcccaaacagacataaaatctgatgcggattggcatgataataatgtgattttaaaaagctgggatgtagacaaagtgagtaatgtttttggaaatggaagaaatatttctgaaaataaaaccatgcctaatatgcataatgataatttgaatgataattatatatattgggatgacggaagttcgattgttatacagaacggcaatttacaatataatacgaaaacagaattagagtactcatatttaggatatttatatggaaccatgccatatcttacagatgaaactacagaaaaatttcctgaaacagagatttcaggtattgataaagaagcggctattgaacaggtgaaaagtattctggatgaaattggtgtagaagtttctaaacccagagtgtattctctgacatatgagaagttggaagaaaatactgattattcacaaactgatccaaatggaaatgcacctcatcagtggacaaaggaagatgcggcgtatgccatagtctttaaaggcacaatagatacgctgccgataacggaagttggatatagaagtggaccggctgcaggagaaaggattgtgggaattgtgggaaaacaaggactcatagcttttcatgcacttaatatatatgaactcgaaacagaaaatgaactttcagatgaaatattgaccacacaaacagttttggaaaatatccaacaaaagttcagaaatattatgattactgataaagttgaaatcgaaaaaattaatttagagtatgttccggtattaaaaaatgttgaaaaatgggagtatgagttaaaacctatgtttgtatgtatggcaaggcaaaatattgaacattcgacagataaggaagacaatggtctgataggagacagcagtatttttccaataatttttgacgctcaaaccggaatggaaattcagataggaggtacatattgattctacaacaattgaaagcagattacaaaagaatattcagttcacctaaaatgtatttatcaatattaggagttgtgcttttgtgttatataagtacagaaaaatatatacatggcagtgtagatatatattacatattggatattttaattgggttgagcgttttcaaaaaattgataattattttttcggcgctgccttgtgtgacaggtttttatgacgattggaaacatcaatatataaaaaatatagtcattcgaacgggaagaagaaattatattatatccaaaatcgtggtgtgcgtatcaatttcttttctggtagttttcttgggaattttgattttcataggtctattaattggtatgggattcgattatagcggaataaacggaatgggtttagatgagaatatgccatatggcatttttctatatcaaaagccatttttatatgtatgttgtatcgtcagtatttatgcagcatcaatggcagtttgggtaatgagtggattaatgatttcatcatatattcctaatagttttgttgcaatatgttcaccgctcatttttagttatttattagaagagataacgggtcttttaccgccatattttaatatgtatctgttggcgaaagcaagtaatgtattggggaaaaatgcaacgtatagctatttgtatacgatattcatatttacagtacttatattaggccagggtttgattttcgcaaaacgggtaaaaaggaggttagggaatgaaatcagttaaaatttctttgattgttgcaatacaaaatattagaaaatggagaacaaattatcggatttggatattagtgatattaactatgatatttgttcaatgttatacaaaggagatttcaacaaatgcattggctatggggatgaaaagctcaccttggctatatccatttttgtatacagatcgctatatacgaatcctttttatgttgccgttgatatttatatattgtgacgctccttttatagataagaatcagatatatatattaatgagatgtaagagaaaattatggagcattggtcaaattatttatatttttatgacatcagcaatgtatttttctttaatagcagctatgacgattgtgctaaatataagaaacatagagtacatgaatgactggggaaaggtattaggtacattggctttttcaaatgttccgttggtaaaagggactgcagtaacaataagtacttatattttaacatattttacacctactcaagcgatgttcttcacttggttattatctgttttgtgcggaggaattttaggcttaattatatatgggtgcaatgttatttcaaagtcaaaaattgttggaatagtagcttcaggatttttggttatcttgagtgcggcagtttcaggaaatgaaatggcacagtggttttcgccagtctcgtggacaacattaaataaattagatgtgggaaaattgacacaatatcctacatttacttatgtgatggttgtttatatgacagcgattattattttaagtgtatggattataaaagtaatcgaaaaaaaggatgtcggagtaatgatacgggaggtataaacatggagaagctgatacagataaagaatctgacaaaatgttttggagagacgaaggtattagataagataaatgtgaatttcgatagaggacatatttacggaatcattggtagaaatggttcaggaaaatctatgttaatgaaatgtatatgtggattggttgtacctacttcaggtgaaataataatagataataaaaaattaggtacagatattgatttgccggaaaatttagcaggaattatagaagaaccgggatttttggaaaactatagtgcatataagaatttacagtttttatctatgattaaaaataaaatagggaaagaagaaattatacaaacgttaaagagcgtaagacttgatccatacagtaaattacatgttggtaaatattctatgggaatgaaacaaagactgggaatagcacaggcaattatggaaaaaccagaaattttaattttggatgaaccaatgaacggtttggataacgatggagttatggaaatgagaaaactctttattaacttacgagaagaaggaacaatgattataattgcaagccataataaagaagatatagaagtgttatgtgatgaagtttttgaaatggagaaaggtaagcttacacctgtacaacactaaactgtcaaaacaacagtggaaccattatttaagtaaatggttcaactgttgtctttgtatgtataatatcatctgcaatccgtattccatatttatcaaggtcaaccctgccgtctatgacgtcaatgccatccgctcttagacgtttagcctgttcatcggctccgccgaaggcaaatgcccctgacagctcaccctttgcatttaccactctgtagcatggaatttcatcaggattgggattcttgtgcagggcattgccgacagcccggcacatttttttgttgcctgcaagctcagcaacctgtgcatatgtggcaacacagccctttggaatcctttttacagcctcatatatgagccgagtcggattataggtgacaaggtcatagctgtctgcaatcatgttttttatagcgtcatcaggtatgctgccatcgagaatgatggtattccagttgtccttgttctggtgccagccggggatgaccgatgggaaggcatccctccagaagtcgcgccaggcaggagataccttgacatttaagttgataaaaccattgcgctcataggtccacaggaaagcctttttgctgtcctttacgcggatgagctgccagtttgggtcgtggaatggtgcttcctgatatgtatttggaaaagataaaccgtagtttaatgcttcttgtcgtgttttcatagattttgcctgctttcttttaattacatgattacagtataacatagaaagaacaaatgtttaatcgcgaaatgacaatttattgacttaattcaacgtataatttctctatctcaccatcttccttagaattaacaaacaccagtgtatcatccgattttatcatgagaataggagcgtatccgtcgaatacatacaggctgcattttccaagggtgcgtccttcatacctgccgatatcgtagctgtcggtagaggctccgtttgtacgcaggaaactgtcatccggcagctcgtccagaagcttaagctctgtgatgtcatttacatcaatctcgcttgtatagccaccggcagaaatagtaaggttattgtttgtcagagtgattttttcctgtatattaatcaaaggaagcatgcagacaaacaccaggatgatacagccggctgttattgcacaggtgattcctgtgaaaatccacgcgccttttttagcataattaaacgtgtagttgccggactgcatgcggttttcaatgagaatatgtttgtcgtcgggattatagtagtagccggttttccagtattcatcatcgtccacatctattggtgaggtgttggcagacagcagttccttctttctgtttaagcccatataaattggaacaataaatcccaaaacggctattaactgaatgaaaatatacacataataggatgatgccggaagtattccggtgatacctgtgtataatgctacataaatccatgcgacagcgtttagtccgcttaggagaagcattgcgatgcttttatattttttcatggtattgttgacaataaggttgagctttgaatccatgctgtatacgtggcgctcgcttttgtttataaaagcatgaaataccagcgaaagtgtggatattaaaacagagcacaaaaacagcgaaatcataaggatattgtaatgggtgtcaccaagcataaagtatggtatatatgctgcaagctcagtaattaaaaagagtgcgtgccatttatagctgactgtcgtggtaccggcttctgctgaaacgcgggtgtcgatataaacctttttgcgttgggtttctattatccatccgttttgtattttcagagcatacattttccggtgggagctgtttggaatatgaataattccaaagatatatgcaaacatccagataatatataccagaacaaaaacggcaatgttaaaaaaaacaataaagcatatcgcaatggagataatcatattggcaatctgaaagtgtttcattttgcattttccggtggtgacgatttcggttacttcggcatcttttttgtgagatgatggaatatgtacattgagatacatgccattttcatatttataggcgtgtgtgtacgcaaattgcatacatagtatgataaaaaggtttgtaactataaagataataaacatgataatttccatagtctgcctcctctgctaagcggtacatggtttcatttgtgaatacattttatcacacattgataaaaattcctcacggctcattccggtgagacaggcctcagcacttaaaagctcaagctctgattccagcttttctgtgaaatcggtatcatctgcgatggattcggacacaaaagcgccgagccgtctgtctgtacggataaatccctcttttttcaaaatctgataggatttattgaccgtcattgtgttaacaccggcatcgcttgccagctgacgtacggttggaagcttttcgccggtctttagctcacctttgcctattccctttacaatctggtttctaagctgtacgtatatcggggtgctgcttgacatgtcgagttctattatcatgagaacctcctgtatcttactgtttatatgtcatagcatgcttgaaatgtatcaatttttatgagcaggctgtaatatgacaaaatttgtaagtgatataaatgtattatttgtattatatacagtaatacagaaaagacattctgtcaacggatgttttagcatcaactatattgacatttggaatattacaattatgattaaagagttataaggtatcacaacgtaaaagaatacatatgaggttataaaatgagcagattaatagagcagataaaacaaaaggatgcctgtgccttcacacatggtggcaaatttcatgcagatgatgtgttctcatcagccttgcttttgtatataaaccctgagatcagcataacaaggggcaatagtgtgcctgatgattttacaggaatagtttttgatatagggcgtggtgagtttgaccatcatcagaaggacagcagaatcagggaaaacggtgtgccgtatgcggcatttggcctgctgtgggaggctgttggagcggatattctaggtgaggagcttgcggtaaaattcgatgagtcatttgtccagcctctcgacaacaatgacaatacaggtgagaaaaatgagcttgcaacgcttataggcaatttcaacccgtcatgggattatgagggtggcagcgatgaggctttctttcaggcggtaagtgtagcaggcatgatactggaaaacaaatttgagagataccgtggcaatgagagagccgataagagagtggaggaggtgcttgcaaagcacgatccggcaagcaggatacttgtgcttcctgagtttataccgtgtcagaaggctctgagtgagacggatattgcgtttgttatttttccgtcaaacagaggtggcttttgtatacagccgcagaaaagagaatactcgatgaattacaagtgttcttttccggcagagtggctggggcttgaaggtgaggagctggtaaatgctacaggaatttccggtgcgatattctgtcacaagggaggctttatcatgactgttaaggagcaggatgaagctgtaaaggcatgcgaaaaggcgctttctcttcataaagacagctctgtgatagtatggtatggcagtaaaggagatactgcagccatggcatgtgacagtcagacagacgagctgcttataaatgttgcaaaagcacgaggaataaagggtgtgcatatatgtcatgttgatgcaatgcctgttccgcagcttgaattaacagaacttgacagtgagacagcatatgcagaggtactgatggagaagccacagtggaaggcatatgtaaaggagcaggtgaaacgaattttgaagtacagaccggaggctgtgtatgtggaaggaaacgcatttgagacgtatcctgttatacgtgcactcagaaagaagcacattcctgtgcttacgatgattgaaaataaagagaaaaaaataatggtaagaataccatgatttatgtgcttttttgaaaaaatttggtataatattatgattaaagggggcaaaataccttttgaccatcatatcatattatttaaaagaaatataactattctacaagtaacaatacaaggatacagcaggtatgaagacaatcataaaatacgagcttgtcataaataaggcactcagatctgcactcaattatgatacaccggatgagcagattaatgagtttatcagattttttggaaaacatatcggttctgaccgcatatatatatttgaggattgtgatgagaagcatgtcaccaacaatacatatgagtggtgtgcggatggaatagtgccggagatacatgaattgcagaatgtcgatatggacataataggatggtggtatcaggcctttggcagtgagaagaatataattatcacagatatagagcagataaaggatgagcacagggaatcctataatctgttaaaggcacaaaatgtaaaaaacctggtggtatgtccaatccgctacaaggatgagataaagggctttttcggtttggataatccaccggaaagtgatactctcggactgaccacgttcttggatatgataggaaccttgcttatatcattgcttaagctgcgcaattccttcacaaagtcgaataaggaagcgaagcttagcagctattcatcgctttcaagcatctatatatccatggcagtggtaaatgtgcagacacacagataccatatagtaaagactttggatgaggttacacactttttgggcgtgaagccacagaaagagggagagtataagatagatgaggatttcccggggcatataaacagtgtgatgaatgagttctgtactaaggcacatcgcaaggaggcacttgaatttgtggatatcactacagtagaggacagacttcgtggaaaaaataccatagtacatgagcttatcgggaaggtatcgggctggtgccgtgaaaggtttattcctgtagactatgacgatgatggcaggctttggcatgtgctttactgcgtggagaatattgacgaggaaaaacggcgtgaaaacagactcatgtatctggctcagacagatctcatgacaggtatacgcaaccgcggaagcggagagaataagataacagagtatctcgtccgcaaacagtgcggtctgttatgccttttagactgtgacaagtttaagtcaataaacgatacctatggacatgtggtaggtgacaaggtgataatagcaattgctgatactctgcgcaaatcatgtcgtgatgatgatgtcgtgcttcgcctgggcggggatgagtttgcggtatttataccggggatgcttgataaagagcgggcagaagctttttttgacaggcttttttcaaacatagagcatattgatatagcagagatgaatggaaagcatatactgctcagtcttggcgcatgcttttatgacggaatggattgtatcacgtttgaccagctctacagaagggcagacaccgccatgtatgacagcaagaaaaaacagggctacagtgcgacaatttatgatgcaaagcaatgatagtccggcatattaaataaaaagaggagaatgaaaatgcagacaggaaaagcaatatccattccatcaatcctcaaggtgggaaatggaacattaaacaaaatcggagagtatttaaagagtgaggagctgacgagcgtagtcatttttatgggaaacggtctcatagatatgtttggagatactataatgaagtcgcttactgatgccggtatcaccgtgcttgagtacagtgagcttgatacagttgagatagacgatatcatcacccttgcctttgatataccaaacaaggcaaaggcagttgtgtcagtgggcggcggaaaggtgatagatgcaggaaaatatgcagcttttctaagaaatatgccatttatcagtgtgccgacctcaagctcaagcgatggtttttctagcgccagtgcatcacttttggtgcacggcaagcgtacatcggttcctgcaaagcttgcacatggtattatagttgatacacaggtcatccgcacagcccctgagaagtttatatattcaggcatcggtgatatggtgtcaaagattacagcgctatatgattggatttttgaggaaaagcacggtgcaggtgtggtcaatgacttcgccgtgatggtcgctaaaaaggcggtcaacagctttgtgcgtacaccttatgagagcataaaggatgagcttttcctaaaggagcttgtggattcgcttgccatgagcggcatagcaaacgagatagcgggaagcagtgcgccgaccagcggcagtgagcatcttatttcacatgcgcttgacaaaattcttgagcatccacagcttcatggcatacaggtcggcatagcaacctatatcatgagtgtggtgcagaaccacagatatgtaagggtgtgcactgtgctcaaaaggacaggctttttcgactatgcggccactcttggcatgagaaagcaggattttctggatgcgatagatatggcgccatccatgaagccgttcaggcacacatatctgcatgagaaggagtaccgcgacgcggcaaagaagcttgtgctcgaggatgatatactgaataaaatactggtatagagatatgtatgagaagactatagagccggttgcgattatgcacaccggatttggagagaaatttggcattccgaggcagagcggcctcgtacctgaggcggcagggcggataatatttgaacccaaataccaaaatcccgatgcacttcgcggaatagaggagttcacacatttgtggattatatggggcttttctgaaaacagagtggagaaattcacaccgctcgtcacaccacccaggcttggaggccgggaaaagagaggcgtttttgccacacgttcgccgtttcgcccaaacggcatgggactatcctctgtaaggcttgataaggttgagtacaaaagcagcaagggacccataattcatgtgtcaggtgtagatatgcttgacggcacaccaatatatgatataaagccgtatctggcatatgcagactcacatcctaaggcatcagatggctttgccgcagagcatagatgggatacggtgcatgttatctggcgcgatgaggcactcaaaagctgtatggatgaagatacccgcattactgtggaacatattctggcacaggatccaagagctgcatacaacaaggcaaaggattatatctatggcatgagatatggcagatttgatatacgctttgtggctgattcacatgcaggcgcgatagagatagtggatgtcgtggagtgtatagacgggtatcataaggtgaagtgattttgatttgcatatggcgccacaagagagtaaaatggtaatgcatacaaaaggacaaatgcgtcatgaatatatttgcaaatacatattaaatacatataaggaaggtacatacaatgaaaacagtaaaggactatatcagaactatcccggatttcccggagaagggcatcatgttccgcgatgtgacaagtgttatccaggatgcagatggattaaagcttgcaattgatgagatgataaagaggcttgatggacttgattttgatgtgatagcaggagcagaatcaaggggctttgtttttggcatgccgatagcatatgcgcttcataagccgtttgtcatggtgagaaaagcaggcaagctgccatgtgagactgtatcaaagacatatgaccttgagtatggcacagcaacaattgagatgcacaaggactcaataaagcccggtcagaaggtggttctcgtggatgatcttatcgctacaggaggcacaatgcaggcagcagcagagcttgttgaggagcttggaggagaggttgtgaagatgcttttccttattgagcttgcaggtcttaatggcagaaagcttcttagcaagtatgatgtggacgcagttgtgtcatatgatggcaagtagagctgttatatctgaatgaatatattttatatgtttgtgcatactgacattaattaaatctatgatttgatgagattaagagtaaggagagtcggtatgcagcaaaaattgggaaagtggagtctccgttttacggaggctccttttatattggaaagcagttctgttgtaggcacaaaggaggctgacggaccgcttggaggtctgtttgatattgtaggaaaagatgacaggtttgggcagaacacgtgggaaaaggcagagagctccatgcagcgagatgcactcacaatggcccttggaaaagcacatctggatgcgtccgacatggactatgtatttgcaggagatctgctcggacagtctatggccacaacatttggtgtggaaaacttccgtattccgtggtttggagtgtatggagcatgctccacatgcggggagtcgctctcgcttgccgcggcatttgtggcagcagggtatgcaaagcatgcggtggcagtgacatcaagccacttcggcagtgccgaaaagcagtttcgcttccctaaccagtatgccaatcaaagaccggtgtcagcgacgtggacagtcacaggaagtgcagcatttattgtgggtagtggagcaggtggtaatgagacacagatcgggtgcgacaatgcagatagtatatcaaagaaggtgcagattgagggaatcacgacaggagttgtggtggattatggcataaaggacgccatgaacatgggcgctgcaatggcccctgcggcctgtgagctgatagtaaatcacctgagtgattttggaagagaggcatcctattacgataggatagtgacaggagatcttggaagcgtcggacagaagatactgatcgatctgtgcaggcaaaagggcgtggacataagcaaaaatcatgaggactgtggcatgaagatgtttgatgcaacgaatcagaacacaggctcaggtggttcgggctgtgcatgctcggcaactgttttgtcagcatattatctgccaaagcttagaagcggtgaattgaagcgtatactatttgtgccgacaggagcacttctttcgcctgtcagcttcaatgagggagagtcagtaccgggaattgcacatggtgtggtgcttgaagctgcaatttgaagctgatggcttcacatatataatagtgttaacgtgccgtttttgggggaggggctgcacgttcaaaaaatagaagaaaggcgtaaggatataatggattatgtaaaagcatttgtggtgggtggtataatctgcgccatcgtacagattttaatggaaaaaacaaagctcatgccgggcagaattatggtaatgctcgtgtgcacgggagcgtttcttggcgccgtcggcatatacgggccattttcaaagtgggcaggcgccggtgccaacgtaccgcttttgggctttggcaatgtactgtggaagggtgtgaaggaggcagtggacagcgagggttttattggcttgtttaagggcggctttaaggcttgtgcggtcggagtgtcggcagcactgatcttttcgtatatcgcggcactcatcacgaaacctaagttaaaaagctgattaatttaagaataatgcataattaacagtaaattgcccatactatctccaaaacgaaaaggagactgatacaatgaagaaaatgaaatatttattggcactttgcctgatactcgctgctgcaagcgcttttgcagcctgtggaaacaatagtaatgtggcagacacttcaatggttgaaaatacacaaagaggtggctctgccgccgacgatgccggtaaagccggaaaggatatcatagatggcgccggaaatgccggcaaggatgtgatagacggagcgggcgatgccggaaaagatgtgatagacggcgcaggtgatgccggaaaagatgtgatagacggcgcaaaggatgccgtagatgatgccggaaatgccataaaaaagagtgttgatggtggaaacaacaactaacagctatttataaaaagaaaacagtcactatatatgcttcaatggctgcaaaaacaaaagcaccgacaacatcgctgataaagtgcacacctgatatcacccggacacaggcaatgatagctgcaaggactgcaagcaaaatgccgatgaaccataaaggcgaggcagcaggtgagcatattaaaacggtaaatgcaattataaatgcagaaaaaacgtgcctgcttggaaaagacctgccgtgggtatcctttgtaatgacaggcggcatatcaaatttttcgtatgggcgtggtctgtttacgatatatctgaaaaccgatactgcaataaagccgacaagcggagcaatgattgagagtgcaagcatatgaccggctgtaaagcacagatacagcacgtatacagggtatgtgataaaaactaaataggtgcatattttattgattaattcaagctttcgggctgccctgttgttttcacggaatggggcagtcatttttatgtatgtattttttttcatgattattttccatcgtttatttaagatatattgtattgtaactgtctagagtggtgtcaactgcccttgcggtactgcagaggtgtcatgccatagtgctttttgaaggctctgttaaaatatgacaggctttcaaatcccacttcaccggaaatagaaagcaccgagctgtctgagctttgcaaaagtctcgcagccatggtaaggcggtagtcatttaaatagtcaacaaacgatgtgcccatggtctctttaaaatatctcataaaatgagactcggaaaatccggctacatcagcgatatcggcaatggagattttgtcagcataattattttccacatatttgagcacaaccttcatcttatcaagagtctttttgctttttagtggctttgtcagattacggcaacggttatcaagcacaaaaaagaattcgtagagcttgctctttatataaagctgatagccctgcggcatcgtcttgcaaatctcatcgcatgcatctattggagccacgacatcctcgtagtatggatacaccggtgtaaaaactgtcggaactgtgaatctgccggctaagagaggtgtaagaaaatcctccttggtgtaatcgtactttccggtaagcagcatcgacatggaaaatatgatattttcgtactccatcgattcatccatatattggtctatagagtgaagctgtcccggcagtatcagcaccaggctcggcgctgtgacatggtactccttaaaatcaacagatatatgaccgcagcccttctttatatagataagctccatgtcgtcgtgccagtgcagcggaactccggaaaaatcaagaggaatcgagcacaggtaggtattgtatgggaacgtaagctccacatgtgttttgtcttcgtgataattttcatattctaatatattcatgatgatattttagcatattatttcttgaaaagccactaaaaataccgaaaaatgataggattgtgcaagttttcgactgtatattgcaagaattgtgcagtgtaatggattatacttgattcatcaaatgacacaaagaagttaagcacgctaaatgaaaattagttaatttgacacattggcgtgtatacatgataacagatttgggaggaaatcaaaatggcaatcatgcaggaaatcgaaacaaagcttcagaagggaatcagcgttagtacagacgaggaagtatactacgcattacttgagcttgtaaaagacaaggcagagaaaaaggtttcaaacaaaggaaagaaaaagctctactatatctcagcagagttccttatcggaaagcttttatcaaacaaccttatcaacttaggtatctacgatgaagttaaagagactcttgagaaaaacggaaagtcacttgctgaaatcgaggaaatcgagcttgagccttcacttggaaatggaggacttggacgtcttgcagcatgcttcatagattcaatcgcaacactcggactcaacggagacggtgtaggcctcaactaccactacggattattcaagcaggtatttgagaacaatctccagaaggagactccaaacccatggattacaaaggagagctggcttacaaagacagatatcacatatcctgtaagctttggcggattcacagtacagtcaagactttacgatatcgacgtagttggatacaacaaccgtacaacaaagcttcacttattcgacatcgagtcagttgatgagtcaatcgtaggcgacacaattgatttcgacaaagatgatatcaagaagaaccttacattattcttatatcctgatgattcagatgataagggacgtctccttcgtgtataccagcagtatttcatggtatcaaacgcagcaagacttatccttgcagaggcagaagcaaagggctctaatttacatgaccttgctgattatgcagcagttcagattaacgatacacatccatcaatggttattccagagcttatccgtctccttcaggagaagggcatcctgatggatgaggctattgagattgtatcaaaggtttgtgcatacactaaccacacaatccttgcagaggctcttgaaaaatggccaatcagcttcttggagaaggctgttccacagcttatgccaatcatccgtgagcttgacaacaaggttcgcgcaaaggtagctgacgagagcacatacatcatcaaggacggtcttgtacacatggcacacatggatattcatttcggatattctgtaaacggtgttgcatacctccacacagagattttaaagaatacagagctcaataacttctacaagttatatcctgagaagttcaacaacaagacaaacggtatcacattccgtcgttggttaatgtcttgtaacccggagctttcagcatacatcacagagcttatcggtgaaggctggaagaaggatgcaaacgagttagagaagcttggcaatttcatcaatgatgacactgttctcacaaagcttgttgacatcaagaacgcaaagaagacagagcttgcttcttacttaaagaagactcagaatctcgacgtacctgacaattcaatctttgatatccaggttaagagacttcacgagtacaagagacagcagctcaacgtgctttacatcatccgtaagtactttgagatcaaggcaggcaagaagccatctacaccaatcacgtgcttcttcggtgcaaaggcagctcctgcatatatcattgcaaaggatatcatccatgcaattctctgcttacagcagattatcaacaatgatcctgaggtaagtccataccttaaggtattcatggttgagaactacaatgtaacattagctgagaaattattcccggctgcaaatatttcagagcagatttctcttgcttctaaggaggcatcaggaacaggaaacatgaagttcatgcttaacggtgctattacacttggaacaagtgacggagcaaacgtagagatagctgagcttgtcggcgatgagaacatctatgtattcggtgaggattcacagactgttatcgacagatatgagagaggcgactactgctctaaggattactatgacaaggatgcagacttaaagaaggctgttgacttccttgtaagtgatgagatgatgaaggttggttctaaggagaacttagagagactttacaacgagctcctcaacaaagactggttcatgacattccctgactttgaggattactgcaagacaaaagagaaggcttacgctgattatgaggataagaaggcttgggctaagaagatgcttgtcaacatcagcaaggctggtttcttctcttctgacagaacaatcaagcagtacaatgatgaaatctggcatttagaggcttagaatttttcttcctcctttaaatacaaattgggcttaagaactcctgcgggtgcatcccgcgggggttctttttttgctagagtacgggacgtaagcgcaggggacggcaggctccctggcagaaatgtaagggcgggatttacaagtttggcaaatacatatataataaggggaagaatatacacatggagaactattatgataaagaataaatttatggcactcacgcttaccgtagtgctcacagcaggcatgcttaccggctgtggctccgacgacaaggcaaaggacaaggatgcgtacagacagtatggcatcaactgtatagagaacggcagctatgatgatgcggtcgatgcttttcagaaggcactggaccagtcggtgggctcagtgggcgcagaggagcttgacatatgttattataaggcaaaggcacagtatttaagcggtgacgtggatggagcaattgatacatatacggctattatcgactatgataaggattctgacgcatactatctgagaggctgtatatattttgccaagaatgattcagacaagggcttgaaggattttaagacggcgctcagtgagaataatgataattatgagctctatcttggcgtttatgagaccctgtcaaagtatggcatgaatgaccagggaaaggaatacctggataatgccttaaagcttaaggcaaaaactgctgatgactatatgcagagaggccgtatatacaccatgcttggagattatgattcagcaataaagagtctgcaaaaggctattgatgagaagcttgtcaaggcaaactactatatgggtgaggtatatcagaagaagggcgacaatgacagctcgcagaagtattttaagaaatacctagacagcggtgaggcggattcgtatgatctgatgaatatgggacaggcgcagatggacaatggtaactatgacactgcgattacttattttcagaacgcacttgaacttgaaagtgtgccgaacaagcagcagataacaaaggctatgattatagcatatgagtattccggcgattttgccacagcaaagagcaaaatggaggaatacatgaaggattatcctgatgatgaggatgcagcaagagaatatcagtttttggagaccagatagattatggcagatactattaagatagaggatattgaggagagagtggtgctcgtcggagtaagtgagcaggacggtgatgatgcagatgattcactttcagagcttgcggagctggtaaagacagcaggtgcgacagttgtaggcacgcttatccaaagaagagaaaaaattcatccgggcacgtatgtcggcaccggcaaggtggcagagattgcagagcttgtggagagtacaggggcaacaggcattgtgtgcgatgatgagcttagtcctgcacagcagaagaatctggagacgtaccttgacacaaaggttatggacaggacacttgttattcttgatatttttgcatcaagggccacaacaagtgagggtaagatacaggttgagcttgctcagctcaagtacagattaagccgtttgtcgggactgggaaagtccatgtcaaggcttggcggtggaataggaacaagaggtcccggagagaaaaagcttgaggtggaccgccgtcttataaatgacaggatagcacagcttcggagagagctgaaagaggtgcagaagcacagagatatcacaagggcaaagcgtgaaaaaaataaagtaccggttgttgcgatagtaggatatactaacgcaggtaagtccacgctgttaaatcacctgacagaggcagatgtgcttgaggaggataagctctttgcaacgcttgatcctacaacgcgtattcttgcgcttgatggcaagcagcaggtgcttttaactgatacggtcgggtttatcagaaagctgccgcatcatctgatagaggccttcaagagcacccttgaggaggcaaagtacgctgacatcattttccatgtggtggacgcatcaaatatgcagcgggaaaagcagatgttcataacttaccagacattggatgatcttggtgtaaaagacaagaaatttgtcacactttttaataagcaggatgcccgcacagacaacgaaccgctgcatgatttcagggcagattatactcttaacatttcagcggcaaaggatctgggattagatgaggtaaaatctcttttagaggagatattaagagagaacaaggtatatattgagagaattatcccatatgataaggctggcgtgatacagctcatcagaaaacagggcgagcttgtgtcggaggaatatgtggctgatgggatacagataaaggcatatgtgccgatggaggtgtacggcaggctcgattagggtgctgcttcgctatatcattatattaagcgaggaatttaaaatgtcgaaaacgcgttcaatccgctgggacaagctggacaacacagcaaatctgttccctagtatagcgggggagagcatgacaaatgtatatcggatctcagtcaccttaactgatgagattgacagtgaaaagctgcaggaggcactggatatagtgcttccgaagtttggtctgtttaatgtgagactcaggatgggagtattctggaactattttgaggaaaatggcaaaaaggcaccaaaggtgcatgaggaaaatacatttccgtgcagatttataagaccgaacaagaatcacagctatcttttcagggtgacatactataagaacagaataaatcttgaggtatttcatgtgctgacagatggcatgggcggcataaatttccttagggagctcacctaccagtatctgcgtctcacacatccggagattgcaaagctaaagggcgattcattgacgcagggcacatccttaaatagagaggacagctttgtaaagaactacaagtcaagtaagccaagtggctttaacaggcagaaggcgtatcttttaaagctggaaaaggtacctgatggagagtttgggctgatacatggcatgatgcctgtatcacagctgaagcaggtctgccaccgctatggagtttccataaatgattatctggtagcatgctttgtgtggagtgtgtatcaggagtgttttcacggcatgccaaacgatatgcctgtcagggttgcagttcctgtgaatcttcgtccttattttgactccgtgaccacaaagaacttttttgtcatgatatctgctgagttcagaccgcaaaacagctcctacacatttgaggaggtgcttaaaatagtgacggattccatcaattcacagatttcgaaggagcatctggaggatcttttctcatacagtgtgtcaaatcagaaaaatatcctgatgagaccggtgcctctttttataaaaaatctggcaatgaaggcggtctatacgcagtcggcactggcgaataccaccactatcaccaatattggaaatataaaggtggagccggaatacgagccgtatataacaggcttttattcctttataccaatgtccaagggacagcctatgaagggcaccatatgctcctacaaggacacgctggtgtttactttctcatctattctggccgatacgatgattcagagaagcttttttaagaagcttgtaaatgacggagtggaagtgacaattgagacaaatggagagtattatgactaaatgcatgaaatgcggtgtgtatattgcagacaatacagataaatgcccgctctgccagcaggttgtggcaccggttgaactgtcatcggacaatcatcagggcactgaaggggtttttgaacagcataatgatgtgccggataagtgcgtaaacgatacagatagtgcagcaaagagggcagatagtacagatagtacagcaagccatgacaacggtacgagatatcctgacgtcaagggcgcatcaagaaaatacagattgctggaaaatatcatattgtttctgtctatagtaggacagattgtgctgacaactgttgattacatgacagaccatgagataaactggagctttatagtgcttcttgttgtaatctatgcgaatgtgacgctgcgtctggcaatagtcggaagaaacggatatatttttaaaattgtaagcacatttgtgttcacggtgctgtttctcgagggcatagacctgctcacaggagccagtggctgggcacttacatttgttttcccaagtgccatactggcgatggttcttgcaacaattatacttatgatagtaaacataagaaactggcagagctacatgatgatgcagctttttcttgtgctgatgagcgtgattgcgatgatacttgtggcagtcaaggtcatatggttcccatatctggcaatgggagcgatgggcgcatcgctgtttttgtttctcggaacactgattatcggtgacaaaagagccagaacagagctgaaacggagatttcatatatgataggctttcatggaataggaaattcgcatatgtttgaggatgaagagatgggaaactaccatccggaaattgaaaacggcgatagtaatggtgataatgaaactggaataataggagctttgggtaataagcttgaaaagacatttaagaactcattatctgccatgaaaagtgagcatgtggaaaaagcccatagcaatgcagctgtggcagatgaagaagtcagtatacagggaaaaatacttgctaatctgatgggacatatcacaaatgaccttgcaatcggcaaaaaaataaaatccggagagctcaggaagcgcatgaaggaacctgcatggcttgttccggactgctttgtaacagaggatatagatatgggcggtttcactatgaagcttttatcttcaaaggaaaacccaaatacagagcgtgtgatactgcagttgcatggtggtggatatatgggggcagtgcgcaatgcatactatgtatttgcaggcctttataatgaggtaagtgaaggctgctcagtgctcacgcctgactatcgcgtggcgccggagcacccgtatccggcagcacttgaggatgccatagcctgctataaatggctcttgtcacagggctggtttggttcgcagattgtgctggcaggagactcagcgggaggaggacttgcaatgtgcctcaccatgtatcttcgagaccacgtcatgccgcttccggcaggaatagtagccatgtcaccatggacagacctcacagcaggcggagagtcatatgagacaaactacgaaaaggacccactgtttgggaacacaagggacagtctgatctacgtgaatgactatcccggtgaccacgataaaatggatccatacatatcgccgctgtttggtaatttcagaggctttccaccaatgctcatacaggtaggctcgatagagatgctcttatctgactcggtagaggccgctgcaaaggcaagaatccagggcgttaaggtgcgactgtcagtgtatgaggggatgtttcatgtgttccagatgggatacctcaatttcccggagtccaagcgtgcatgggcggaggtcaagcgtttcctaaaggtgattaaagaggaagaatagaggagaagcagataatgattaccggagaattaagaaataaaatagataaaatatgggaaacattctggacaggtggcatcacaaatccattagatgttatagaacagtttacatatttactctttataaagcagcttgacgaagttgagacaacaaaagaaaacgaggcaaattttcttggtgtagactatgagtctatgtttccgggtgaatgtcagaaatatcgctggagcaaattcaaaaatctcggttcagcagaggaaatgtatgagcttgttttaaatggagtgtttccgtttataaagaatctgcatcaggacggggattcggcctatgccagatatatgggagatgctatattcaagattcccaccgcggcaatgctgtcaaaaatagtcgatggaatagataagcttgagctgggagacgaagattctaagggtgatttatacgagtatcttctctcaaaggttgcaacagccggaaccaatggacagttcagaacaccgcgacatatcataaaaatgatggtcgaactggtaaaaccgtcaccggatgatacaataattgatccggcaatgggaagtgcaggctttctgatagaagcacagagttatctaagagaaaaccatccggagcttttccttcacaaggagagccttgagcatttcaataacacgatgttttatggcaatgatatggatagaactatgcttcgaatcggagctatgaatatgctgcttcatggcgtggaaaatcctaatatttcgtacagggacagtctttcagagcagaatacggatgttgaaaaatatagcttagttctggcaaatccaccgtttaagggaagtctggactatgaggctgtttcagcagatttgcttaaggtgacaaagacgaagaaaacagagctgcttttcttagcactatttttgcgtatactcaaaaaaggtggcagggcggcagtgattgttcctgatggagtattgtttggtagcagtaaagcacataaacaaatcagaaaagaaatcatagaaaacaataagctcgacgcagtcatatcaatgccaagtggagtgtttaagccatacgcaggagtgtcaacagcaatccttattttcacaaaaacaggctcaggtggtaccgacaaagtctggttttatgatatgaaagctgatggattaagccttgatgacaaacgccaggaaatcgcagacaatgatatcccggatattattgagagattcaatcatcttgatgcagagactgacagaaaaagaacggatcagagcttctttgttccggttgatgagattgtgtcaaatgactatgacctttcaattaataagtacaaggaaatagtctatgaggctgtgcaatatgagccaaccgatgtgataataggaaagattgacgctctggaaagtgagatacagggtgaactggcagagcttaagaaactgttggatgtgtaaaagcaaattcgtgtttgtaaaattcttgataaatagaatgcatgttagacaaaaaggcgattagatgttaatatagtataaaagaagtgctaccgatagacggtcagcctgatatatgtattgattaaagataaccgccacagtttaccagaccagggcggttatttttgtgtcttggaaagattaatggtgtttatagcaggagtgatgtagatgagagtaaaacttgaggatgtttgtgagcgtggctcatcgaacataaaacagtctgatataattaaaatgagtggtaattatccaatttatggtgcgtcaggattggctggaaaagtaaatttttatcatcaggagcaaccatatgtagctgttgtcaaggatggagcaggaataggcagaacaacattgaatccagcaaaatcttcagtgataggaactatgcagtatctaataccaaagaaaaatgtattaccagaatatttgttttatgttgtgagttatatgcatttagaaaaatactacactggagcaaccattccacatatttattttaaagattataaaaatgaagaatttaaccttgataatatagagaaacaattggaaatcatagatgttttgggtaggtgtaaaaaggttatagaagccagaaaacaagagttagttgaattagacagcttaacgaaagcccgatttgtcgagctgtttggagaccctagaagtaatccgtttggattcgagaagaagaggttaaaagatacgtgcaaagttattactggcaatacaccttcacgagcaatagcagaatattatggtgattatatagaatggataaagacagataatattgtttctggaattcttaatccaactcaagcgacagagagtttgtctgaaaagggtatgaatgttggacgtacagttgaaaaggattctattcttatggcttgtattgctggaagtatagcaagtattggtagagtttgcattacagatagaacagtggcatttaaccagcagattaatgcagtagtacctgaacaatacaatattctgtttttgtatgtgctgtttcagatgtccaaggattatcttgtggaagatataaatatggcattaaaaggtatattgtctaaatcgaagcttgaggaaaaagagtttattattccaccgatggatttgcaggaacagttttccgacttcgtcaaacaagtcaacaaatcaaaagttgcagttcagaaagcattggatgaaacacaaatattgtttgatagtttaatgcagaaatatttttgtaccttgaaaacttcatacaaatgatttgatgaataaatattctattcttaagaatatctaacaatcaagacatccgagaaacaaaaccaagttgtgaacaacaacaaagttctttaagttattaatgatgcaacgctatgcatcgaagagattaagcaaagaagagcgcagggtggatgccttggcactaagagccgaagaaagacgtgataagctgcgaaaagctgcggggagatgcaaataatccttgatccgcagatgtctgaatggggaaacccggtacgaagaactcgtatcatccatacgccaatccataacatatggaggggaacccggtgaactgaaacatctaagtagccggaggaagagaaagaaacatcgattttgttagtagcggcgagcgaaagcgaaagaggccaaaccggagtgcgtgcactccggggttcggaccgcatttaagattcagtgattctagcagaaaggtttgggaaagcctgccggagagggtgaaagccccgtaagcgaaaggagaactgactgagcgggatccagagtacatcgagacacgagaaaccttgatggaaagagcggggaccaccccgtaagcctaaatactacttagtgaccgatagcgcatagtactgtgaaggaaaggtgaaaaggaccccgggaggggagtgaaagagaacctgaaaccctgtgtttacaagctgtggaagttctttaaatgaacaaccgcgtactttttgtagaacggtccggcgagttgcggatactggcaaggttaagcacttaaggtgcggagccgaagggataccaagtcttaacagggcgtaaagtcagtatacgcagacccgaaaccgggtgatctatccatgtccaggttgaagttgtcgtaaaagacaatggaggaccgaagccacatccgttgaaaagggtgggcatgaggtgtggataggggagaaattccaatcgaacccggagatagctggttctcctcgaaatagctttagggctagcctcgatttagtcttatggaggtagagcactgaatttccgcgggggcgtcaaagcttaccaaagaatatcaaactccgaatgccatgtagatgatgatcgggagtcagactgcacgagataagttgggcagtcaaaagggaaagagcccagaccaccggctaaggtcccaaagtgcgtgttaagtggaaaaggatgtgggaattcgaagacaactaggatgttggctcagaagcagccatacattcaaagagtgcgtaacagctcactagtcgagagttcctgcgccgaaaatgtccggggctgaaacacgacaccgaaatgaaaagattaacacctaaccgttcttttagcaagcggttttattattccaatgcacctccatgtaagcagtgatacctgaaattactgactttacatggaggatttataatgtacgaaaaatatttattacagcttgaggaagccggaaaaatccgtaacctcaaagagcgttctattgactgctacaaaaactatgtttcctatttcctgaattacatggaaaaagttccggaagagcttacatgtcaggatgtcagagactttcttcttgccaagaaagacgatggtctgaaagcaaccaccctcaacctttataattcagccatccgctttttctatcggaatgtacttcacattctgtgggatgatatcactgttccacgcatgatgatagatcacaaactccctgtcgtactttctgttgatgaaatcgataaacttcttgatgctacggatgatttgaaatataaagccatgtttgccaccatgtattcttccggaatgcgtgtctctgaagtggttcatcttcattacggggatatttcacgcacccacatgcagattcatgtccgggataccaaaaaccgtatggaccgttataccattctttccgagcggaatctggcacttcttacagaatactggtttgcatgtggaaaaccccgtgatattcttttcccgaataaatttacaggggaataccttaccgtttcttccgtggaacaggttatccgccgttcagcagcgactgccgggttatctggtgttacgcctcactgcctccgtcacagctttgccacccacctgatggaacagggtgtggaacgacagaatattcaggctctgctgggacaccgtgacccaaaatccacggaagtttatcttcatgtcagcaacaaatctctgatgggaattcaaagtccgtttgacaggaaagcaggtgctgattatgaataagcccacggttcaggatattttccagtgtttttatccggcatatcttgaaaagtattctccctctcctgaacaggcaaaagttgcacggaacatcttgaactgtaaaacaggagcctacggtgcgaatgtcagtgtatgtgaagactgtggtgctgtccaggttcattataattcctgccgcaaccgctgttgtcccatgtgtcaggctgttccaaaggaaatctggatggatgctcgcagagaggatgtacttgatgcgccttactttcacttggtatttacggtgccggacattctgaatccaatcatttacagtaatcagaagctattatatgacaccttgtatcatgccgcttctgcgacaatcagtgaactgactgctgacccaaaacatcttggtgcgaatgttggatatatctgtatcttacatacatggggttctgagatgaactttcatcctcatatccatacaatactgctcggcggtgggctgacatccaaaaatgaatggaaagacaatggtactgagttctttcttcccatatgggctatctccagagtcttccgtggaaaatatatggatgagttgaaaaatctctggaatacgaatcagcttgagtttcatggaactgctgaaaaataccgtaaccattatacatttaaagaactgcttgattcctgttatgatgcggaatggattccttattgtaagaaaacttttaacggtgcgcagtctgtgattgattaccttggaaagtatacccataggattgccatcagcaatcaccgcattatccgcatggatgatgaaaccgtcaccttctttgtaaaagattaccgaaacaaaggagaatggaaagagctgaccatttccggtattgaattcatacggcgttttttgatgcatgtgccgccaaaacgttttgtcagaattcgtcattacggacttctttgttcccgaagtaaacgcaaaaagcttactttatgccggaacctcctaggctgcaaaaagtatctctcaaaacttggggataaggaaatgcctgaaatattaaaacagctctatgggataaatgtctgtgtgtgtaaatcctgtggcggtcatcttggaaaaccacagcttcggataccgcaaagatgttaaaagttaattctttcatacttttttaagcctcaaagtttgaggttttgttgtcgtacctatttatccggaaatagttgatttctgtggcttctgtacagaaaatcctgtataatcatgggtaagaaccaaagattgaaagtccataggcagtggctacccggacgctcactttgttcaattaggtcaaatcgaaaatggtgtaaacgaagaggcagttcactggaatgccaaaactgctttttcgtttaccccatcatcgattctaacctaaagaatttttacacggatcagaaatggggaaaagctgctaattatacgttgtgcctgaacagctcacagctcgggtatgacaaatgtgagagtataattattgaatgtgtatagtgtaataaaatacactgtttaagatattgtttgtgcattacattttattgagaaaataaggttactatagtataataaactctgaaaatattgcagcagaataatagggtttgtgaagtatatgggaaaggaggcagcttcatgaaaaaacatgtccagacagattcagagtggcaggaggaaatgtcacagaaaataatagatgaaatacagtgcgagctgtatctcgacatgccttttatgaagctggcgctctcggctctttcaccaaaggtgaacgagcagctttactccatggcaactgacggcacgtatatttattacaatcccatcaggctgattgatatatttaagaaaaatggcatgtatctgaaccgggcttatctgcacagtgtgctgcactgtctgttttttcacctgtggactaaaggtgagagggatgaattcctgtggaatacagcatgtgatataatggttgagtatacgattgatacaatggaaaagaaaagcacaaagcgtatcctaagttatataagaaaaaccacgtatgagaggcttaaaaaagagcatatagtgattgctccgggagctttgtacgcatggctatacaagcagtatgcagaaatagaggctgaagaaatcacggacatagatgatattgcaaacacaaaggataaaaatgagcttgcacttctggcacgggaattttacacagatgaccatgccttttggccggaggagaaaaacgacaatgctatgccactaagttcatccgaggcccaaaagcagtggcagaaaatatccagacagacacgcatggagaaaaaacattcaaaggacagtgaatccgagggcgagcaggtaatgatgagggagctgtccgcgaaaagaagcagacgaagctacaaggagtttctgcgcaggtttgcagtgcttcgtgaggaggtacacgcagattatgattcctttgatatggggtattacgcgtatggactttcgctttacggcaatatgccgctcattgagccgcttgagacgagggagacatacaagataagggattttgtcatagtgcttgatacgagctattctgtgagcggggagctggtggagcactttttacaggagacctttacaattctcacggagtcggacagcttttttgtcaggaataaaatacgcatcatacagtgtgatgacagcgtaaagacggacgaggaaattacagatgaaaagcagattaagccgcttttaaacaagtttacgctcgtaggaggcggaggcacagatttcagaccggcattttcgtatgtgagagaccttctggataagggagagcttaagaacatgtgcggacttatatattttactgatggcaagggaattttcccggcaaagtgtccatcgtacaagtgcgcatttgtgtcggttggtgcatatgagggtaatgaggtgccgccatgggcgatgcaggtggagctggaggaaacaatatgaatataaaacaggcaaaaaacgaagtgaaaaatacagtgaaagcatacctgtcaaaggatgcacatggagagtacgtgataccgcagatcaggcagagaccgatgctcttaatcggaccgcccggcgtaggcaagacacagattatggagcagattgcaagagagtgcaaaataggtcttgtggcatataccatcacgcatcacacgcgccagtcagcggtaggactgccgtttataaaggagcgtgagtatgacggaaagagctattccgtcacggaatacacgatgagtgagattatagccagcgtctatgaaaggatggaagcaacagggcttaaggagggcatactttttattgatgagataaactgcgtgtccgagacacttgcgcccacgatgcttcagtttttgcagtgcaagacatttggtaatcaggctgttcccaagggctgggtgattgttgcggcaggaaatccgccagagtacaataaatcagtgcgcgattttgatatggttacgctcgaccgtgtcagatatatatcgatagaagcagactatcaggtgtggaaggaatatgccagagatgtgcatatccatgatgctcttttaagctatcttgagcttcacccaaacaatttttacagggtggaaactgacgtggacggtatgaatttcgtcacggcaagaggctgggaggatttaagcagcctgcttaaggtgtacgaggcgggagaacttgcagtcacggaggatgtaataggtgagtttatccaccatcctgatatagcagaggatgtgtacgcatatctggaaatctacagaaaatacaatgaggattacggtataagcgatatattgaccggaaatgtgaaaaagtcagtatataaacgtgtgtttgatgctgattttgatgagagaatcactgtggtgaatctgcttttaagtgggctgacagttgttttttcggatgtggccagagagcggaaaatggtgcagctatggtatgagtttttgaaggaatacagaaagtcacaaagaagcactgaagagcagcatgcgctgtataacagtgctgtggagcagttttcaaagaatatggagatattgaaggagagctctcttattttgccaaaggaatattacatcagacaggatgtcttaaggcatatcaagggtgattttgatacggtgatggatgattttaccgaagaatctgagaagctttcaacgatggaggatgcggcaggggagaagctaaaccacgcatttgattttgtggaggatgtattctcggacggccaggagatgcttgtctttgttacagagctgaccatcacaccggaaatcagcagctttttagctgagaatgagtgtgaaaaatttgatatctacaatgaaaagctcatggttggaagcaacaggacaaggcttttaaaggagcttgagagataaatcctgttgatgtatgcagggaagatttgaaggaattatctatgatttatatatttagcgctttttatgctgaggcaaaaaatataatagaccactatggcttaaaaaaggaaaaaagccctgaaatggtcagatttgatgtgtttgcaaatgatagtatcaggcttgtgataacaggcgtaggagaaatcaatgcggcggcagcggtttcaaatatcggtggtgcgtatgggatttcaccggatgatgagattttgaatgtggggtgtggcgctggttttagcagtgatatctgtttgggcagtatatttctgggaaacaagctcactgagcagatgacagggcgtacattttaccccgatatgctgatgaaagcaaatttcagggagtgtgagatagtaacggtcgcaagggtgcttaatgaagggagcgattcggttgtatatgatatggaggcagccgccgtttatcaggcagcagcgtttttcgtgggaccgcatcgtatgcattttataaagcttgtttcagatgccggtgagagaattgaccagtcgaaaatcacagagctttttgctttgcaggaagacaaaatatgcggctatattgatatacttttaagtgtaggtggtaataaaacttcaatagatgataagactaaaggcgaaaatatggcagacggcaatgcgacagatgatactaaatccgcttggaatattaacaggctgaccagcgatatgcgctgttccaaggtaatgggggatcagctggcacagcttataaagtattgcagactaagtggtatagattataaagctgttctggatgagtactatacaaatggcttgctgccgtgtgagagcaagcgtgaaggaaagaaatgtctgtttgaattgaaacagagattgttgtaagaaggaaatgtcaaatgtgccaatacaataaaatgttttcacatgtatatgtggaaaaaggcgtggccgagcatccacgtacaaagcagattttagaaaagctgaataatacaacagtcatagaaattgaccactacaaggatgttttctgccgcaaaaagcagagtatttctgctcaaagcaatgccaaggcgctcattctggcagagaatacaagcggctgcatatatgaaggtgcaccggtgtgtcagagctttggaaatgagaatttctactattgctcatgcatgatgaactgtatatttgactgcgaatactgttatttaaagggcatgtatccgtctggtaatcttgtggtgtttgtaaatttggaggatatttttgcggagcttgaagcacttctggcgcaaaaaagcatatatctttgcgtgtcatatgatgcagacctcgtggcaatagagtcgcttaccggctttgtgagggaatggattgcttttacaaagaagcatgagaagcttacaattgaaatccgcaccaagagtggcaggtgtgatttgtggtgcaattacgaagcctgtgacagggtaattattgcctatacagtttcgcctcaaaggggtgcagcagagtatgagcattttgcgtccgcacctatggagcggattcaggcagcaaaatgtgctatggatagtggatttccagtgcgactgtgctttgatccgatgatatactgcaaggactggagaggtgaatacagcaggctggttgatgacgtattttcacagatagacggttctaagttgtgggatgtgagtatcggaagcttccgcatatcgcaggattatctgaagaaaatgcgaaaggacatgcctcgtagtgctgtggtgaattttccatacgacaatgtgaatgggtattaccagtatccggaaaacatacgaagtgatatggaagagtttatgatacaggctgtatccgaatatgtggataaggacaggatatttatgtggaagtgatattattgcaatacattttcaatacatacacatagtataaaggagcaatcagatgaacaaagcaattgtaaccggggcgtcttccggcatcggaaaagctatatgcaggcagcttgcagcgaatggctggctggtttacggaataggaagaagcttcaatcaaagtgatgatattgctgggatagagcgtatagtatgcgatattaccgataccgcaaagctcatcaagacaataaaagaaattaataaaaatcatgatatatcacttctcataaacaatgcaggcgtcggcttttactcgcttcatgaggagcttaatcctgtaaaaatatcacagatggtgaggacaaatcttgaggcaccgatggttatcacaaatctgctgcttcgcgatttaaagaaaaacaaaggaacaataataaatatctcatcaatcactgctgaaaagacgaatccgcacggctgtgcctatggtgccacaaaggcagggcttacgagcttttcccacagcctgtttgaggagtcgagaaagtacggtgtgcgtgtggtaaatttagagcctgatatgaccgataccaatctgtacaggaatgctgattttacagtggatgaaaatgaagctgcaagaatacagccaaatgaggttgcagacgcagtgctttatgttttggggcaaagagaaggccttgtgatgacagatatcaccataaggccacagcttcacagaattgcaagaaagtaaagtgtttatattttaaaaagcatcaaatgccattcgaacgattgacttatagtcattaagcgtctggcattttttaattttcttccagagcttttcagagtcagaaaacagcccatgcatatatgcccagatttccttcatgcggaaaatggcatccttttcaccggaaaagatggacagataaccggataaaatctcatcatgccagttctttaagcgctcgcgaagctcggctttatccatgcttatacctttaagctctgcgataagagcaggatttgcaaaaagtccgcggcctatcatgatttcattaatatcagggaagcggtcggttagggcattaaaactattagtatcagtgatatctccgttgtagcagagtatggttttatcaggatttattttctgcatggcgagggcgaagtcatccatgcgcggcgtatttttataaaaatccttctggactctcggatgcacggtaagctcacttattggatatttactgtatatttctataagcttgggccatagctcatcatcgttaaagcccacgcgggtttttattgaaacaggaaaatcagcttttgtatacagctcatcgaggaagctatccagcatatcaggatatgcgagtatgccggagcctcgtttcttggatacgacggtgcctgacggacagccgagatttacatttatttcatcatatccgtaaggaacaagctgcctgtgaaggtcgatgacctcatctgccactatagacatggcctgcggtatgagagtgattccgtcgttgtttaccgggtctatgtctctttttatcttggcattcatgcgctttgcggcagggatgaatggtgtgtagtatttgtctatgtagtcgaaatggtggtggaatgcgtttcttactgtatatccggtcagcccttgcatcggtgcgagaaaaaatttcatgtgattgtgaatctcctcatttatgattaatcagattactacatgctacgcattcgcgtaatctgactctaccttttgatcctttaatcataatatgggaaaaagcctgaaatgtaaacccccataacatgaaaagaagccgagggaagcggcttcttttcgaggagtttagtttatgaaaaaatgtttaaaaaagggaatttgtaaaggtgtatctcctttacaggtattactatactaaataaatttgtccaaattgtgtccttaatcgaaaagaataataaaaaacttaaataatttatgaagaaaaaagctaaaaaaatcatttgaatttgcacattgaatatattgaaaaaaaattgataattagatacaatagacagtaaacgggtaattgtatcggttgaatacttatggttagggagcagataatatgagttatgcagataaagtttttgtagcgatgtgtcaggatattctggaaaatggcacaagcactgagggagagctggtgcgtccccactgggaggacggcacaagcgcctatacaataaagaagtttggtgttgtcaacagatatgatttgtcaaaggagtttccggctatcactttaagaaagacatatatcaagagtgcaacggatgagcttctttggatatggcagaagaaatccaacaatatccatgatttaaaaagccatgtgtgggatgagtgggcagatgaggatggttcaatcggcaaggcctacggatatcagcttggtgtaaagcatcagtataaggaaggcatgatggatcaggtggacagagtcatctatgatttgaagcatacacctttttcaagaagaatacttaccaatatatatgtgcatcaggatttgcatgagatgaatctgtatccgtgcgcatacagcatgacatttaacgtgacacagaaaaagggtgatgacaggctcacattaaatggtatcttaaaccagcgctcacaggatgtgcttgcggcgaacaattggaatgtatgccagtatgcggtgcttatgcatatgctggcgcaggtgtgtgatatgagagtcggagagctggtgcacgtgattgcagatgcacacatttacgacaggcatgtgccaattgtgaaggagctgattgagagaccgcagtacgatgctccaaagttctggctcaatcctgacataaaggatttctatcagtttacgacggatgatatcaagataacagactatgtgacaggtgagcagattaaggatatacctattgcggtttaaagaatgtggatatgaagcagttataagaaggtcattgttcactactttgtgtgaacagcaacgattacaacagggagaaaatcatgaatttaatagcagcagttgacaataactgggcaattggaaaaaacaaccagttgctcgttcggatacctatggatcagaagtttttccgtgagatgactacaggaaaggttgtagtcatgggcagaaagacacttgagagctttccaaacagcagacctcttaagaacagaaccaacatagtgctcacacataacccatcctatgaggtggagggcgctgtcgtggttcactcacttgatgagcttcacaaggagcttgaaaaatacaattcagaggatatttatatcattggtggacagaaaatttatgagcagctcgtggatgaatgcgatgtagcccacatcacaaaggtggacttcgagtatgatgcggatgcatattttccaaatcttgacgagaagcctgagtggcagattacgggagacagcgaagagcagacatactttgatttggagttttatttccttcgatatgagaaagtaaaataaactattaaaatagaaacgaggatgacagcagtatggacatcacaggaagaaaattatttgtaaaagcattggaggaggaaggcgtagatactatttttgcctatccgggaggaacagttacagatttattcgatgagttatacaagactaattcaattaatctggttcttccgagacatgagcagggcctgattcatgaggctgagggctatgccaagtctacaggcaaggtgggtgtctgccttgtgacaagcggtccaggtgctaccaacacagttacaggtcttgcagatgcgcattatgacaatgtgccacttgtgtgctttacaggacaggtaccgcttccacttatcggaaatgatgcctttcaggaagtggatatagtcggaatcaccagaaatatcacaaagtattctgttacagtccgtgacagaaaggaccttggaaaaatcataaagatggcatttcatattgcaagaaccggaaagccgggccctgtactgattgacttgccaaaggatatacagaccgcatccggtccggcagagtatccggacaaggtggaaatcagaggctatcgtgtaaatgatacagtacatgtcggacagcttaagcgcgcctacaagatgttaaagagtgccaaaaaaccgcttatacttgcaggaggcggtataaatgttgccagggcaaatgaaaacctgcgccgttttgcggaggcagagaatgtgcctgttgtcactacaataatgggtaagggagctataccgaccacccatccgctttatgtgggaaactgtggtatgcacggcaaatatgcggcaaacaaggcagtcagtgagtgtgatttacttttttcaataggtacacgatttaatgacagaataaccggtgacttaaatgagttcgctccaaaggcaaagattgtacatattgatgtggatactgcatctatttcacgaaatgtagtggttgatgtgcctatcgttgcagatgccaatgtggcgctcgacaagttaaacgagtgggttgagccgaaaaagactgctgagtggcagaagcagattaaggcatgggatgaggaaaatcctcttggcatgagaagagacaagggcatgacacctcagatgattatggagcatatcaataagaactataaggatgcaatctacgttacagatgtaggtcagcatcagatgtgggctacacagtacctagagcttgacagcaacagccagcttcttacatcgggaggtcttggaaccatgggctttggtcttccggcagcaataggtgcaaagattgcaaatcctgacaaggatgttgtatgcataagcggtgacggtggacttcagatgaatatacaggagcttgccacctcagttgtacagggagcaggagtgaccatatgcgtgctcaacaactactatctgggcatggtgcgccagatgcagcagcttttttatggcaagcgttattctgcaacctgccttcgaagaagaaagggctgtccggctgagtgcaagggaccaaatgaggcatgtccgccatacacaccggattttatcaagcttgttgaaagctatggtggacacggaatccgcgtggaaaaggaagaggatatagatgcagcctttgcagaggcaaagaaatataaggatgtacctgtaattattgagtttatgatagctacggatgagattgttcttccaatggtcaagagcggaaatcctatgagcgaaatgattttaaagtaggaggtgcagaagatgaataataatgaaatgaaaaacagatggattgcactttatgtggagaatgaggtcggtgttttagcaaaggtttcaggacttttctctgcaaaatcctacaatttacagtctcttacggttggaaccacagaggatgagactatttccagaatgactatttgcgttacaagcgatgatattacctttgagcagataaaaaagcagctcaacagaatggtcgaggtcatcaaggttattgacctgactgatgtgcctctgcatatgaaggaaatactctatgtcagggtatcaaagctcacccgcgaggaaatcaccgatatcttccagacagcgcaggtttttaatattgacgtggtggacaagaatgccgacagcgtgatcttagagagcaagctcacagagcaccgcaatgatgatcttatagccctgctcaagtcacagtacaagcatatctcggttgtgcgcggtggtgccgtggctattgaagctatgagtaccggctgccgctagattatggtattaataagggggtaatatctgtcggtagatattgcccccttacgcggtcatactttataaagaaccggtttatcctatatattaccatagagtaagggacgagaaggaccataacatgtatttataagcgattacgaagtgacttagatattgttagaattatgccatgaaacacagaaatgccctgccatggaaggcagggcaaggcgttatgcgccatggacggcgcataaaagccggtttcgtcaagcatagaaaacataaaagcataattcttacaattatcttagtcacgtagttttaagcgcataaatatatgttatggttcttctcgtcccgtagtactgagcgcacaaacacatacatatgcagacctcattccgtagtattgtcataaaattagcgagccgcaacctcaataatttcaccaacatacatagtgtgcatatcgtgatcgccgtaccattgacgcataatggctttgtctgtaaatgaagcctcttcaataggcacagcagccatcttacggcagaggaatacgagatttgcctcgtccggatatgggatgccatggcgtgtagcaggagtcagaccggcctttgaccatttgtcttcgccacgtccagagtgagcaccacagtattttaaggcatcgcggtatttctcgcttaggaaagaaagtgagaaaaactcaccattgtctatgaaattcttagtatatctggattccctgataaaaataaatacgacatttttgccccagaggacaccggttccaccccatgaaacggtcatggtgtttgatttttccttgtcgccggctgtcacgagagcccactccttactgagcttggtgaatggattgatatcgagcatgtcgatgggatatggttgaaatgtatgcataattttcctcctgaatattaataaaattgacaaatgctgctaagtgacatataatacacttagtaaggcagtcggtaggtgagtgcacttcacctgatccggcaaattaagttaataagttatcgtaagagatagccgttcccagactttaccagaggcaggacggctatttcttatgttttctgtgagtatctatgtatgtcagaatcgctaccagcatgataacgaaagtaaataagtcgttccaagaaaccataataatcatcctttccgtaagactcggatcagatgagagcacgtcccccaaccaccttagtaagtgtattgtatgtagtgcaagtcagaaaaatttgagattttcctgaatgtacgggcagtcgccctatcaaattaaaaatatataaaaagtgctcagcaagctggcatttttatatattttcaatttggcactgctcgttgcctacgctcattatatcatatgcgttgcactttgtgcatattattgtaaaaagatattaaggtaataatattcatgaaaaatctgcacattttacaacaggagtcaattgatgaggggcggcttcaggtgagagtacgacagaaaaacatggggacgccggttgcggatgcaagggtatcagtcagctattccggggatccgcagggaaagatagaggagactgacaccaacgaatcgggaagcatagaggcagttgagattgccactccgccacttgagtattctatgtcgcccagtgagtcacagccgtattcggaggtgacggtaactgtttcagctaacggatacagaaatatcacggtttcgggcgttgaggtgatgcccgacagactttccatacaggatattgagctggaagtacttgatgcaccgggaaatgatgtggacaatattgttattccggcacatacactttacggtgattatcctgccaagatacctgagccggagattatgccggttgctgaaaccggtgagattgtacttaatcgtgttgtgattccggaatatgttattgtgcatgatggggcaccatcggattccacagcggcaaattattatgtcagatataaggattacatcaaaaatgtagcttccagtgagatatatgcgacctggcctgatgccactataagggcaaatgtgcttgcgattatgtcatttacgttaaacaggatatacacggagttttatcgcggaaagggctataattttaatatcacttcgtccacggcatatgaccacaaattcatctatggcagaaatatatatgataatatctcgctgatagtaaatgaaatgtttgaaaactatctgtcgagacctaatgtgaagcagccgattctgacgcagtactgtgacggacagaaggtttcctgtccgagctggatgacacagtggggctctaaaagtctcggtgaccagggctacagtgcaattgagatactcagatacttttacggcagcaacatgtatatcaataccgcggaggctgtatcaggaatcccggcgtcatggccgggctacaatataggcataggctcgtcagggcagaatgtataccagatacaaaaacagctcgcccgcatcgcaaaggcatatccggcaattccgtctattgtaccggatggaatatacggaccaaagacaaaggctgccgtggaaaaatttcaggctgtattcggacttccggtatcaggtgtggtggactacaatacatggtatgagatatcaaatatatatgtcgctgtgacacgtattgcggagcttgcttaattgaattaaaggagcaaaacagtgctggcaagagaaaaaatgatgtgatattatataaaataaaagtaactattcacaaccctatttttcagataaagaaagacaattttatgaatacagaaacccaaaattacaagataattgtggcatacgacggcacacgctacaaaggctggcaggtgcagaaatccacagatgatacaatacagggaaagcttcagcatgtgctttccacactggcaggaaagccggttgaggtcataggctcagggcgcacggatgcgggagtgcatgcggtggggcaggtggcaagctttcacatgccgaagcatttttcaaaggatgagatatttatatggctgaatgagcatctgccggcagatattgcggtgacagatatttcaaatgtgtctgacagatttcatgccaggtacaatgctgtgtcaaagacatatgtgtatacaatacacaccggtattgtgtcagatgtgttcaggagaaaatatgtatacgactatgataagccgcttgacacagaccggatgaaaaaagcagcagcgtatcttctcggagagcatgattttaaagctttttgtggcaacaaacatatgaaaaagtcaacgatcaggacaattttttctattgatatagaaaaaacaggcgctgatattgttatcagctacaccggagatggatttttacagaatatgataagaatcatcacaggaacgcttatcgaggtgggcgatggaaggaaaaatccggatgctgtgatggaaattttagcttcaaaggatagggcacaggcaggctacacagcaccggcgtgtgggctgaaactggaaagggtagattatggcaaagtggtatgttagtgcgaagaaggctgattttgcggcaatcggagcgaagtttggaatagatcaggtgacggcgcggataatcagaaacagaggtgttataggagatgacgcggtaaatgaatttttaaacggcaaaatctcagacatttcagacccggctcttttaaaggatggtcagaggctggttgacattcttgtccaaaagatagctgacaaggccaaaatcaggataatcggcgactatgacatagacggagtgatgtctacatatattcttgtgaaggcacttaaaagagccggtgcatgtgtggattatatgattcccgacagagtgaaggatggctatggtttgaatgtgcatctgattgacaaggcatatgaggatgggatagacactgtggtcacctgtgacaacggaattgcggcgattgaggaaatcgcacatgcaaaggagcttggaatgacggttctcgtaacagaccaccatgcagtgccttttgaagatataaagggtataaagatttacaaggagagcaaagcagatgctgttgtaaatccacatcagatagagtgcagctatccgtacaaggagctttgcggagcagctgttgcctggaaaattgtcatattactatatagaaaaatcggcatagatgagaaagaggccatggattttatagagaatgtggcatttgcaacagtcggtgatgtcatgccgctgacaggtgagaaccgtatactcgtaaaggccggcttaaagagtattcatcatacgacaaatatcggcatgaaagccctgcttgaatgttgtaatatagaggctgaaaatgtagatgcatatcattttggatttgttcttggaccatgtgtcaatgcaacaggccgtctggatacagccaaaagagcacttgagctgtttttatgtgataggcaggaggatgccatgcgcatcgcatcagagcttgtagcgctcaatgatgacagaaaggaaatgactgcaaagggtgtggaaaccgcagttgagatatatgagagggacaattacgaaaaagacagggtgcttgtcatatatctgccggatgtgcatgagagcatagctggaatcatagcaggccgtatcagggagaaatacaataagccaacctttatactcacaaagagtgaggacggagtaaagggctcagggcgctcgatagaggagtactccatgtatgaggaaatgtgcaaatgcagtgagctgttcacgaagtttggtggccacccgatggctgcaggactttcactgccacaagaaaatgttgagccattccgtcagaaaataaatgagtatgcatcgcttacggacgatgaccttgtgcctaaaatacatatagatgtgccgatgccggtggattatgtatcaatgagactggtgtctgagttttcagtactggcaccgtttggaaaggacaatccaaagcctgtttttgcagacaaaaatctacgtgtgagccgcatgtgggtagttggtaaaaacaacaatgtgcttaggctttctttgatatcctcatatggcacgccaatcaatgcaatttattttggtgatatagaaagcttttttgactatatcaggcaaaggtttggttcggacgcgcttgaagctgcacaaagaggaaggtttaataatatagtgctgtccgtagtatattcaccaaagataaatgtattcagggaaaatgagtcactgcagtttgaaatacagtattataagtgatattatattctaaaaaggtaaccggtaaaggagaatagatcagtgtttgggaacagagcaaaaatatccgctgaggaattagcgtatatgaaggaacaattggataatgacaggggatttttcgagaatgtaaatgcaaagtcaaagcttatagaggctgattttgatgagctggagaaatcaagacagcttgaggagtcatcccttaagcagctgaatgataatgcaaataatgtggtggaattttcaaaggacagcatggatgccatatcagccttaaacgacagctttacagagtgtgtaaaggcggctgcggacaatcttacaagtcttgagagtgcggcaaaggcaattgccacacagcatgaggatacatgtgtgcttgtcgaaaacaataagcattttacagctccggctaagagcttgtcagagacatcggacaggcttgaggagcatgtggatagctgtgcggatatagctgcgcagatgaaggaacagaataagcagatgagtgttctctcactaaatgctgctatagaggcgggcatgcttggagagcagggaaagctgttcgtggaggctgctgagagcataagggaggcatctgtttcatatgacagtgcaattgatgctgttaaacaggagctttcagaggcaaaagctgagattagtgcacttaaagagcaggtgagccaccttgtagggcttctgaaggacaacaatgttgctacgacaaagctcatgaagcagggtgtggaactcaatcatgtgttttcacagtgtgacgagatttcagttgacatgatagaagcgtgcagacagcagattgtgtcaatccgtaatacacaggaggagattatcaagtttgaggagcgcaataagctgcagatagaggatgcatacgcagaaatttcgactcagaggaaaaattcagtagaaataaaatccactgtggacaaggtgctcgactacagcagggagagagtaagataacaggacagatatgcagactttgagtgtcatgcatttttatgagtgaaatataaaaagacatcaaccggtgtaaattccggatgatgtctttttgagttgaaagctgcaatcattaaatcaaatacgaaccttgcggtttgctgcatcctggaagcttccgcttttctgtggcagatgcatccagtttttgatgtagaccacattgtacataacgaaagcaagcataaaggctgtagaaacgtcaaatactgagtgctgtttgataaacatggtagacagtataatcagaacacaaagcactaaggatgcgtgctgaacgtgctttttatccttgaaatagctgctgtgcatcaccgcaaaatgaatgccgagcgaattgtatacgtgaatgctcggaaacaggttcgtcggtgtgtcagtggagtaaagccactcgcaaagcgctgtaaacatattgtggtgcgtgaaataataaggccttaaattgtgaccattcgggtagagagttgatataaccaaaaatacggtcataccggtgtataaaaacgcacacagtctgtaaaattcttttttgtcatgtaatgccgtgaaagcaattccaaaggccacatagccaaaccacatgatataaggaataacaaagtattcacaaaacggtatataatcatctatcggaagatgaatcaagtgataatgtgtggtaacagtgcgctctaaatatccaaaccaggtcagatatatgataaagtatgataaaatccacacatgcttgtagcggttgaaaagctctataagcttattctgtattttcttcataaaaccacctttttaatccgtttgaaattataacactgaaaaataattcaaacaacaccaaaacaaaagacttaataaattttatgaaaaaattaataattgagaccttatataatgagctttttgtgaaatatttatctgcagcaaaaagcataggatataacctgtgggctaatctgcataaagaatgctaaaatcccatggtgcaagagttatacaatcgcctgctgatactgtactgtcatcgcaaagcttcttgagaccgtctgcatggcaggtaacagtctgctcatcatccgagtagttaagcagataaatgattttttctccctgcatattggtgccgcgctttatgacaacgggataagaagcatcaaattcattttttgcctcgccgaagaaaagctttagggcttctatcagagtgtcctcaccaaaaagtgtggcaagatacatggcgcgtcctttgccataagagttttctgtgatagctgcgtgtactccccagtgcgtgtgctcatacatagcaacaggtgtggcagtggtacagtcgaccatctccatccagtcacgcgcttttgatgatttgccgccacaggttacggtgacatcgtcaggcagggtgaactcatcgtactgtatgccgagagccttgtttataatataaggctgtacgtcatggcgtattttaaggtgttcatccgaaaaagcagatttaaaggtcaccaccatattgccgccgtttgcaacaaattcatttaaggcattgagcacatcatctgttgcgctatagagtgcaggcacaagtatattttcatatgaagcaaaaagtgccgggtcggcaggaatcacgtcgtactcaatgttcatcagatacagggcatcgcaaagccatctgaaaacggtattgtaattggagtcactttcgttgttcagcttaaattcattaagccctgtaagagaggcgttgtcagcaataaccgcaaacctgtttgtctttttcaaatttaccagcctgtgtccgtatttttttagttcgtttccgataacactgcactccttataaagccggttcggtctaaggtcgtgggagagcacgcccttccagtagctttctatggcattgtggatagaatgccagtgccagtattcaaccatgtctgcaccgtttgcgatgtgacttatggcctgcaggcgcagttgtcccggataaggaagccatgggtgatttccggctgcctcagtctcaagcaccagatagttatcaccttttatgcctcttgcaatattgccgcaggcggtaatctcgcggccgctcagactgctctgggaagggtgatatatatcgcagcctgcgatatccatacacttggcagcctcgtattgattgacctccggctgcatgccgtaagagtaatcgtgccattcaaagtcgaaattgtgagtgatgaactggtcatctctcttgtattttttgacgatatcggcctgccatgcaaaaaagtctgtcacgagctttctctggaattttttgtattcagcatcaagactcatatttatagtgccgcggatatcaggaaaggcatcccagtcatccacacggttgctccagtaatcaagtccaaactccctgttaaactcgtcaatgtcaggaaattcatttttcagatattctacgaatttagcctgagcgtatttggaacaggtgtcataaggctttgtctcattgtcgagctggaagccgatcacgcagtcgtagtcctttacctgctccatgagcttttcaatgataatctgtgcatggtgcagatagtcagggtttgtgatatccatgttctggcggtgaccgtagagctctttgccgttatgtgttaaagcgagaatatcgggatatttttttgcaagccatgatggaatagcatatgtaggtgttccgacaatgaccttcagctcatattttgctgcgcagtcaagcatacggtgcaggtgtgtaaaatcaaatactccctcctcaggctcccatgtgctccaggtggattcggcaatcctgataacattcatgccggcatcgcgtatcatcttaaaatctgtttctatgcggtcgtaaggcatatattcgtcgtaatatgccacaccatataatatttcgttaaaattcatttatatgtacctccaatagttataatatgatatgagggtcaaaagatattttgaccctttaatcataatataaatatacgttagtaaatgaatggtgtaaacgttaaatcatcagaaaacaaaatgttgagcgaatatgcgtggaagaatgagtcagttgcgcaaaaattgcatgtccaggatgacaagtgtatgaagataggttataatgaaaaacaatagagttgcgcaacaaataaaagttgttcagtgattaatcacattcagatgaaagaggcggcagaatgagtaacaatatcacgatatcagatgtagcagaggcacttggcgtttcaaagacaacagtaagcagggctatatcggggaagggcaggataggtgctgcaacaagaaaaagagtgcttgaatatatacaggagcatgattataaacctaatgtaatagccagggggcttgcacagtcaaagacatttaatatatgtgtggtgatgccgggggattatgcacttgtcgatctgccttttttccaggaagctataatggggattcaggagatagcaggtatgatggaatacgaccttttgctttgtataggctcaggcaatgatatggcggggcttaggcgtatcatacagaatcataaggtggatggagtggtgctgcttcgcacgatggtagatgatccacaggtgacattcttgcaggagcgcaggataccgtttgtcacagctggctcatgcaaatataaggatgtaaagcagattgaccatgaccatagaagtgcctgcagggagctgacatcaattatgctcatgcgtggcatgaaaaacatggcacttctcggtggaagcgaggatattgttgtaaatcagacaagatacgcaggcgtagtggatgcccatgagcagtttggaaagaaaataaatgacaatcttgtatttttaaaccttgagggcaaagcatatatcgaaaaggctgtagatgatgcaattgacaggggctgcgactgtctgctgtgtatggatgatgcagtttgtgcgcaggccatgagacggctccgcgaaaggcatataaaggtgccgcagcaggtgaaggtggcttcattttacaacagctcagtgctggaaaataatgtgccgtccattacatcactttcatttgattcaaaggagcttggagcaagagcatgcaagaatctgctcagacagatagaaggtgaagagactgagaacaggacacttctgccgtatgaggtagtgttaaaggagtccacacagtaaatagtaaaagccggagccgacaaattgtcagactccggcttttgctttatatagtttaaaactgttaaatcatcgccagataaaccgtcgcgagtgacacaacaatctggataattgcaaatctgaaaacgacctgtgcatttgaccagccgagcttctttctgacgtggtcatggataggagttgtggtattctttaaaatatgtatcttcaaaaatctaagaagagaaacctttacgagtccaagtccaccatcgatgataagcacgagacctgccagtatgtagatgaatgggctttgtgatttaagagcacatatagctatgaatatacccatggctcttgagcccgcatcacccatcaaaagcttgcttggtgtggcattgtaccacagatatccgagcagacataccgcaaataataaaatacaatagttgaagctgtcagctattttgagcactgaatcaagcacgaagaaggtcattatggtaatgatggtaagtgttcccgaaagaccatcaacaccgtctgaacagtttgtgacattgattgatacccagactaagatgactgtgagtattccaaacacaacaggtggaatatttacagagccgccaaatatggcaaaggtgattgtgcttgagttgaaatgcagatacacaactgccacaacaattgcaaccgcaaaatcaagtgcgccctttaaatactcgccccatggcttttcagccgcatcgtcaaagtagcctgtgagcatctcaataactataagcacgagataaatggcaatctccgcattgatttgtgagaaaagcactgccgatatcacaaatgtgaatataaagataataccggctcctctcggcttcccggctgaaagctttccgtccacagcaaactgtctgccgaggtcctttggtaaaaatttatttaattttgcaatagcaatacatgtgagtgcgaatgcaaaaatcactccgatgaaagctattatcgacatatctgccgaagtcaaataagaaatcatatagtcctcctttgatattgtattacaacctcattcattatattagtctgacaaaaaaaagtaaagttttacttgcaattttaaataattgtgttattatacttatatgctttaaagcgttgaagcattaaaactttaaattgtaacatcaagctacagtaatatttatatttgttacaataatatttatacttggaggaaacaaaaatggctcagaaaggtgatttaatgacagcacgccctgatatccgcgtgcttgacgctaccattagagatggaggactggtaaacaactttatgtttacagatgattttatcaatgctctttatcgtgcaaacgtaaaggcaggcatcgactatatggagtttggttataaagcatctaaggagctttttgatgtaaataaattcggcaaatggaagttctgtgatgaggcagctatccgtgagatagtcggagacaacaactctgatatgaagatttctgtcatggcggatgtcggcagatgtgactacaagaaggatatcctccctcgcgaggacagtgtgattgacatggtgcgtgtggctacatatgtacatcagatgccagcagcaatcgagatgatcgaggatgccaagtccaagggctacgaggtaacctgcaacatcatggccatctcaaatacacaggaatcagacttagaccaggcacttgacatggttgccaagagctctgcagacggcatatacatcgtagacagctacggagctctctaccctgagcagattcgccgcactgccgataaatacacagaaattgctgaggcaaacggaaagttcgtaggaatgcacgcacataacaatcagcagcttgcatttgcaaacaccatagaggcagcagcccagggagtcagcctgttggatgcaacaatgatgggcatgggacgaggcgcaggaaactgtgcgatggagcttttactcagcttcctcaaaaatccaaaatacaacgtattccctgtactcaaattcgttgaagagcatatgcttccgctcaaggagagtggtgctgtatggggctacgatattccatacctgctcacaggacgcttaaatcagcatccatcagcagccattgactacatcaagtcaggagagacacattacgctgatttctacacagatttgcttgataaataaaaaaagatagatgtatataaatcaatccgctatgccagattttggtgtagcggattgtttttatgcgcgtgaagcataattcttacagcctcttggctgcgtagtattagcgtattttgcatcatgtgctcctgagaggctccgtcattaaagccaataaactgaaacactttatttctttttcttccacgcaagcagtctctccacattcagcggttttccctgaatagcctgcaccttcaatctgttctcctcactgaaaccaaccagaatatcatgattagcctcagccagataatcgatgataccatcgatatcagacttggtgttcttcggacagtgaatatacagatgcttatttgcggaaatatgcaatgtatatgagatgctgaaatgataccacagaatcttgtgcagggtagagtatttgtaaatccataaaatctctttgataggcacgatggcattgccataaggcgaggtcatgataaaatagtgctctgtgataaacatatcctcagtggcaagctgtggcagtgtcgcaagttcctcctcagcctcggcaagcagcttgtgtgggttgccgaatacaacaagattctgacatgccggtgccaaaacaggaaacctgatgcacaggatgtagaatatcaggctgataacagcatagatgagagtgccaaaataaaaaacaaacataaaaatagtagttttcaaatggtactcaggctcattaagatagcagcctgttatggtatcggagagtcccttggaatcccaactcagatccttcgacagtttatttacaaactgtgtgtaggtgcccttgccttttacgattttaccgaccaccgtgagcttatcgatagagggcagaccctcctcacaggtggatggtgcaagcagaacaatagagcagtgctcatcacgcatgcagtagtagtaatagcccttgatatcgttgccgtccttcatggtgtagccggtaaagtaaagctttttaagggtggtttttacatatctgtccgaatccttgtatgcagcttcaaagctgacagaatcatcaatatgtatgggcgataaaatatctccgagtgaaaatgcaaaccatagcacggtaagcagaatgatatatacaatcggggagaaaagacgccttttgtaaaatgcttttatgttttttgtaatgtagtgttcgtaattattaatcatatgcttagtataatggtttttgtgccttatatcaaccttgattttgaggcatttaattgttattatatgattaaagggtcaaaaggtatcatcgatgcatgcttgcatgcaattcgatgtataccttagtgacccgcactacaccgagaaagtagcaatttgctgcggaaacgcagaaaattagcggatttcgaggtggagtcagattacgggaatgcgtagcatgtagtaatctgattaatcataaatgaggggcaaaataccttttgaccctcatatcattatatatttaatagtaactattagaatcattgagaacgatgggaaagcacgagtatcgtgcggttttgcgaatgtgcgtgggatggttctgaatagttacggtaaatagaaacacgaaatgaggtaattatggaagcatacacgagttttgcccgggtgtatgacatgttcatggacaatgtgccatatgaggtgtggggcagatatattgtcgaaaaactgcgtgcaaatggcatagacagtggatatgtcgtggacttaggctgtggtacgggaaagcttaccacgcttcttgcagatgcaggctatgatatgataggcattgacaattcttttgacatgcttgatatggcgcttgagagagaggatgacagaatcctttatctgatgcaggatatgagagagtttgaaccgggagaaaaggtgagtgccgtcgtaagcgcatgtgacagcatcaattatattcttgagcctgaggatcttcaggcagtttttttctgcgtgagcgaaagtcttaaagagggtggcatttttatatttgatatcaatactccatacaaatatgaggtgctcatggctgataataccatagctgaaaaccgtgatgagggcagctttatatgggacaattattatgatgccgatgagaaaataaacgagtatgacctgacactttttataaaggagcagtcagaggatgaggatgacatctacaagaagtttgaggaaactcatttccagagatgctatgagatttcagagcttaaggagcttcttgagcagtcgggacttgtgtttgatgcggtgtatgatgcgtacacagacgatcaggtgaagtgtgacagtgagaaggtcactgtaattgcacataaagcatagaattagataatgagaggtaaattatgtcagattatatagtaagagcaacagcggcggatgccaatatcagagcatttgctgtaacatcaagggagatggtggagaccgccagagaggatcacatgacaacacctgtcatgacggcggcacttggcagacttctttctgcaggagccatgatgggagctatgatgaagggcgataaggatatcataactcttcagatacagtgcagcggacctgcaaagggacttaccgtcacagcagattcgcacggcaatgtaaaaggctttgccataaatccacaggttgagctgccactcaatgcggcaggcaagctcgatgtgggaggagcgcttgatcttggtatactcacagtcataaaggatatgggcttaaaggagccgtattcaggtcagtgtgagcttaaaacaggtgagatagctgaggatctgacctattattttgccacatctgagcagattccgtcagcggttggtcttggtgtgctggtggataaggaccagagtgtaaagcaggcaggtggatttatcatccagcttatgccgtttacaccggatgaggttgtggacaggcttgaaaagaaaatcacagagattgattcggtgacacagatgcttgacagggggctgactccggagcagatacttgaggaaattttaggggatttcgggcttgaaatcacagatacgactgagacacgtttccactgtgactgttcaaaggagcgtgtgagcagagcactttccacacttagcaaaaaggatcttgattccattatcgcagatggtgagagcattgaggtaaagtgccagttctgtaataaggcatatgagtttacggtggatgagttgaaggagatgcgctaattgaaggacggatatataaaggtcgctgcagcgacaccaaaggtaaaggtagctgatactgtatacaacggacagcttattaaagctcttatgaaggagtgcactgataacggggcaaaggtggttgtttttccggagctttgcattaccggatacacctgccaggatcttttctggcaggataagctcatagctgcagcagaggatgagcttatagggatagcagattacagcaggagccttgacggcatatttttcatagggcttccatatgagataaacggcatgctttataatatggtggcagttgtatcgcgcggagaggtgcttgccatggtgccaaagacatttctgccaaactataatgagttttatgaggcaaggcattttgcatcgggagaaaacttaagcacatatgtcacactgaaaaatggacggcaggtgtctgtagatactgattttatttttagctgcaagcagttgccaaagcttaagatagcggtggagctttgtgaggatctttggactccgaacccgccgagcatcagacatgcgatgtcgggtgccactgtgattgtaaatctgtctgcatcagatgaggtgacaggcaaggcaatatacaggagagagcttgtgagcggacagtctgccagattaatctgtggatatatttatgcgtcagcgggagacggtgagtccacacaggatgtggtctactcaggacacaatctcatctgtgaaaacggaaatgtgcttgccgagtcaaagcgctttacaaatgagactatatacagcgagtttgatgtggaaagaatagagactgagaggcgcaggatgacaacatttgttgtcgaggatgatcacagatgggctgagtttgatcttgaggtaaaggataccactcttagccgctatgtaaatccggctccttttgttcctgcagacaagacagacagggacagacgctgtgatgagattcttatgattcaggctatggggcttaaaaagagattagagcataccaactgcaagacagcggttatcggtatttcaggaggactcgactccacactggcactgcttgtcacggtaagagcatttgaccttttgggaaaggatcacaaggatatagcggcagttactatgccgggctttggaacaacagaccgcacatatgacaatgcggtaaatctcattaaatgccttggagctacatttatcgaggtggatataaaggatgctgtaaatatacatttcagggatatcggacagaatccgtctgtgcatgatgtcacctacgagaatggacaggcacgcgagcgcacacagatacttatggatatcgcaaataaggaaaacggaatggttataggtacaggagatttgtcggagctggcactcggctgggcgacctacaacggagaccatatgtccatgtatgctgtaaatgcatcggttccaaagactctggtgcgccatctggtaaaatactatgcagatacctgcggcagcgatttgctggaaagtacacttcttgatgtgcttgatacacctgtttctcctgagcttttaccacctgaaaacggtaagatttcacagaagacagaggatcttgtggggccttatgagctgcatgacttcttcctttacaatatgctgcgctgtggctatgctcctgccaaggtttaccgccttgcaaggatagcatttgaaggaaaatatgatgatgagtttattctcaaatggcttaagaacttctatcgcagatttttcgcacagcagttcaagcgctcatgtctgccggatggaccaaaggtaggaacagtggcggtctcaccgagaggagacctaaggatgccttcggatgcgtgcggacgtatctggatggatgaagttgataagctgtaatagtaagaggaaaacaatgggaaagacacataagaaaactgatagaaggcaggaaagcatagaacgtgcaaggcacagtgacaggcgcatgaaaataggcgcaatagtcctttgtgcagcgatagccataataacatttgtggctgtgggcatgcagcttttggttcctgttacagaagcagcggtaagtgctgataataagacacgctcagggaatgttgatgtgcagaagaataataattcactcactgcatctaaaatggattcaggaaaaaagcaaaacagctcagaggctgatgtaaacgctgcggaggaaagcagcgagcctgacaaggaaacgaagcttgatgagatacttcaaagtgcagagtatccggtgcagctaaaggagcttgcgaagaagaatgatgaggcaattgacttcatatatgagtatcctgaggagcactcgaaaaagcatgatattgatctgactgcagaggcctcgcaggatacagtacctctattgcagcagtgggataagagatggggctatgaaaagtacagcggcaattattttgcggcgagtggctgcggtccgactgcactttcgatggttgtattatatctgacgcatgatgcacaggcatcacctcttgcagtggcagagtatgcaaaggaggccggctacagtgtggacggctccggaagtgcatgggatcttatgagcaagggctgcaggcactacggcgtaaatgctaagactataaaggaggatgaggatacatttaaagaaaggcttgatgagggcaatctgatagtcgtaaatgtcggtccgggagatttcacagacaatggacattttatggtgatcacaggctatgatgatgagggctttactataaatgatccaaacagtatcataaagagcaatacccactggcagtttgagaggctgagttcgcagatcagggctgcatggaggatgtttgtgtagataatagcagcacatgaatttatgctgatgtttgtgatgcatatggaaaaattaaaaaataagaaataaaaaacctgctgtgtcacatgcttgtctgacacagcaggtttttaataacaaacagtaaagtatggtatgcagattatagcaattgaataccatgctcctcacattccttaattgtctcctcaggccacagcgagctctgtacctcaccgatatgagcctttctgaggaagaacatacagattcgtgactgtccgattccgcctccgatagtgtacggaagctccttgttgaggatagccttctggaatggaagcttagcacgctcaggacatccggccttgtcaagctgctccttcagagatttttcatctacacggatacccattgatgaaagctcaagtgcgatatcaagaacaggatagtatacgatgatatcagcgtttaaagtccagtcgtcatagtcaggggcacgtccgtcgtgaggctctccgtttgcaagcttgtcaccaatctgcattacacagattgcaccctttgcctttgcaaaataatactcgcgctcctttggagtattgtctgggaacatttcctcaagctctgatgtggtgacaaaggtgatatcctttggcagaatcaaatctatgtagtcgtactgtatagccatgtactgctcggtcttgcgcaggcatttgtatactgtctttactgtttcctcaaggaaatctaagtttctgtcctccttgcggatgaccttttcccagtcccactggtcaacaaatatagagtggatattgtcagtctcctcatcacgtcttatggcattcatatctgtgtagatgccctcgccgagagaaaatccgtatttctttaatgcatatctcttccacttggcaagagagtgaacgacctcagcctccttgtcaccctgctcaaggatgccgaaggtaacaggtctttcatatccgtttaagttatcgtttaagcctgtggtaggatcaacgaaaagcggtgctgaaacacgtgtcagggaaagacgctgtgcgagcatgccctggaagaaatccttaacagtcttgatggcaagctgtgtatcgtgaagattcagtgccgaagaatagttctttggtattgttaatttgctcattttcgattaaacctcgttgtattattaatttttaaataaaattcctttaacttgattattatatcacaatttttctagaaagatagtccataatatgataaaattagatagtttaaagagaaacaatatcgttttaccttatttttatgtgtttaaggtgttaatgaaaggtagtagatttatatgagaaaaagagatatgacctttgcttcggcggtgcttgaggcaatagatgctattttagctcttgcgtatataggcttacagatttattatggagtgtgctatcacatacaggtatttaagtttgtggccaatatacttgtgcttttgcttgtatacattgcaatcacatggctgcagcattatccggaaaagctcaatcacatagcagcggagctgtgtgtgggcaatatcagaaagtattcactcaggcttttgacgtttgtaaagcttgtttttactgcggggcttttggtgccatgcgtgtgtgatgcgtttggaatagcaatccgcgatgtatacagcctcattatgatagggctcatccttgtggtgtcggcatattatgagtacaggatatttcaggaaataaagtcattgcggaaataatataggagaaataaaatgcagcttagtatagaagaagttaaaaagctggatagtaacagctatcagataatagatataagaagtgaggaagaggtggcgcacggtgccataaagggagcactcaatattcaggcagaggaaatagagtcagatgagagggtgccgcatgataagaagcttgtcatagtctgcagccgtggtaagacgagtgtggatgtggcagagtatctcacagaaaaaggttttgatgcggcaagcttaaagggaggctatataagctggctgcttgatgccatgaaagaggatgaggtggcagagcgcgatataaaggcagatgtggagcaaagcatcagaaagaaatttaagaaatccatctggcgcaagtttacaaaggcgataaatacctatgagcttgtaaagccgggggataagattgcagtgtgtatctcgggcggtaaggattccatgctcatggcaaagctttttcaggagcttaagcatcacaacaagtttgattttgatgtgaagtttctcgtcatggacccgggctacaatgaggcaaacaggcatgtcatagaggaaaactgcaggaaccttggcatccctgccactatttttgagtcagatatatttgatgctgtatatgatatcgaaaaatcgccatgctatttatgtgcgaggatgagaagaggacatctgtatgcatttgcaaaggagctgggctgcaacaaaattgcgctcggacatcactatgatgatgttatcgagacgatactcatgggtatgctctacggtgcacaggtacagaccatgatgcctaagcttcacagcacaaactttgagggcatggagcttatcaggcctctttacctggtcagggaggacgatatcaaggcatggcgtgattacaacggtctgcatttcatacaatgtgcctgcaagtttacagatacctgtaccacctgcaataatgaggaaaaccgctcaaagcgtgttgagataaagcagctcatcgctaatcttaaaaaggtgaatccttttgtcgaggcaaatatatttaagagcgtggagaatgtaaatctggctacggttgtagcatataaaaaggatggcataaagcacagcttcctagatcactatgatgaataagacagatatatttcaggagggcattgtatggcagatatcatggattatattgactggcgtggagacataggctttgatgaggtgcatgtaaatgaggtggacggactgattttttcacagcttatttatgtgcagatgaagccatatatgccggatgcaaagaagtcataccttacgataaaacagctttcaagcctttactgtgcggatcacagtgatgatgagattgagcagatgcctaatcttttccgccactccgcgaggctgcttcaaaagctggcgcactcaaggcgctatgctgactgcattttgagatattatatatacgatataagtgaaaaagaggagtcgcagttttctgcggttacgatagaactgcctgacggcacatatttcatttcctacagtggtacagaccattccgtgattggctggaaggaaaactttaatctaagctatctcgatgagacacccggacagaacaaggcaaaaaaatatttaaagcaggtggcagcatatatttgtaatgatgaaaatatcaacaataaaagcatcaatacaagaaagctgtggataggcgggcactcaaagggtggaaatctggcagtgtttgccgccatgcatgtggataaagaggtgcaggatgtcattattaaggtgtttaattttgacggaccgggcttcaatcacaagatgatatatacggcgggctacaaaagaatttttgacagaatagagacatttctgccacagtcgtctattgttggcttattgcttgagcatgtggacgattatgaggtggtaagaagccgtaattcggggccgctgcagcatgatgctttttcatgggagataatgggcggaagtatcataaaggcggatgggctggacaaaaacagtgtgcgccttgacaagacactcagaaactggataggcagcatggatgaggcgcagcgaaagcagtttgtaaatgtgcttttttcaatagcatcggactccaattttgagaaccttgaccagatgtcatttaagcagctcattgagatgataaaggctgccgatgatctgtcaaaggctgactggagcatgcttaaggatacagtaagactcctgatttctgccggtgtcggcgtggtcagggatgaaaaggagaaataaatgttaaatcagttttcaagaacacagcttttgcttggaaaagaggcgatggataggctaaagggcgcaagagtcgcagtatttggaataggaggagtgggcggatatgtctgcgaggcactagtcagaagcggcgtgggagcgattgaccttatcgatgatgacaaggtgtgtcttacaaacctaaacaggcagataatcgcaacccgaaagaccataggaaaatacaagacagatgtgatggaggagaggattcatgatattaatcctgatgtcagtgtcgtgacgcacaggtgcttctttttgccggaaaatgctgataaatttccgtttgaagagtatgattatatagttgacgcggttgatacggtcacagcaaagattgcgcttgtcatgaaggcacaggagaaaaatgtccctatcataagcagtatgggagcgggaaataagctggatgcaagtgcatttaaggtggctgatatatataagaccagcatgtgtcctcttgcaaaggtcatgcgccgtgagcttaaaaaacgtggcgtgaaaaagctcaaggtggtatactctgaggagaagcctacaagaccgatagaggatatgtctataagctgcagaaccaactgcatctgcccgccgggtgccgaacacaagtgcacagagcgcagggatattcccggaagccttgcatttgtaccatcagtggcaggacttatcatcgcgggcgaggtggtacaggacatagcctttgacagggtatgatgaagaatacaattacgaaaagagaggaataaaaatgccagtatttgattttagcgatacaccggtagcaaacgagcatccggagtgtacatatgagacatttcattcgacagagaccaaggcatcggccgataaaccgattgttgtgatagacaataagcaaaaggagtgggcgcaccatgagctcggtatgtttacaaatccgataaagcgtacatcctttgaatttgagaatggtgatggggtgaccagtgcagatatcctgcgcattgattcccgcttcgttagcctttttaagtggcttggcgaaaatcacataaaggtacagctttcaggagccaatacacctgacggatacgcagtatacagggtgagggaggtggctctcggcagaggcacaaagctgtctgcagaggacggattcctgcagtatatgatggaaaggctctttgccagcaccatgcctgaggatgaacctgacctcgatgattacgaggaagagggcgacagcatgaagctcaccagtatacagagcatcacagatttcatgacctgtgcaggccgtacactgcctgacaatatactgctgtgggccagaagaaatctggcagttgcgcgttcaagcgaggtatcacctgaggagagacgccatgcgcagagagcactttccatcatgatgaatatccagtggaagggaaattactttgaggcaattgaccctgtggaggcaaggcgcatactcgatgaggagctctatggcatggagagcgtgaagcagagaatcattgagaccattatccagataaacaggactcatacacttcctgcctacggactgctgctctgtggaccggcaggaaccggaaagtcacagattgcatatgctgttgcacgtatactcaagcttccatggaccacactcgatatgagctccataaatgatgcggagcagctcacaggaagctcaagaatctattcaaacgcaaagccgggaatcattatggaggcattttcacaggcgggagagtcaaatcttgtatttatcatcaatgagcttgacaaggcctcaagcaaaaacggcaacggaaatccggcagatgtgcttttgacactgcttgacaatctgggctttacagacaactatatggagtgtatggtgccgaccgtcggagtatatccgattgcaacagccaatgataaatcccagatttctgcaccgcttatgtcacgttttgcggtgattgatattccggactataccgatgaagagaagaaggtcatcttccagcgatttgccctgcgcaaggtatttgagcgaatgggaatgaaggaggaggagtgcgttctcacagaggacggacttgatgcagtgattaagcttcacgagaacacatcgggcataagagatctcgagcaggctgcagagcatctggcagcaaatgcactttatcagatagaggttgataaggtaaagcaggtggtatttgacgctgaggctgtttttgagcttttaggctagcaggatatattacggatacaggaattgttacgaaaataaaaggagattgtcaggatgagagaatttggaaaatccagaaaattagataatgtgctttatgatgtaagaggaccggtggtggatgaggcggcccgcatggaggaaaacggcacaaatgtgttgaagctcaatataggaaatccggcgccgtttggcttcaggacacctgatgaggtgatatatgatatgtctcgtcagctcacggactgtgaggggtattccaactccaagggacttttttctgcaagaaaagcaatcatgcaatatgcacagctcaaaaagcttcctaatgtgacggttgaggatatctacaccggaaacggagtcagcgagcttataaacttaagcatgtcagcgcttcttgacaatggtgatgaggtgctggtgccggcaccggactatccgctttggacagcctgcgttacacttgcgggaggcacggcagtgcactatatctgtgatgagcagtcagagtggtatccggacatagaggatatcaaaaagaagattacagacaagacaaaggcaatcgtaataatcaaccctaataaccctacaggagcgctctatccaagggagatgctgcagcagatagttgatgtggcaagagaacatgagctcatgattttttcggatgagatatatgacagacttgtgatggatgactatgagcatgtgtctattgcgtcgcttgcaccggacctcttctgtgtgacctttagcggtctttctaagtcacatatgatagcaggctatcgtatcggatggatggttttaagcggcaacaaggcgctcggaaaggactatatcgagggtctcaacatgctctcaaacatgcgtctttgctcgaatgttccggcgcagtcgatagtgcagacagctttaggcggatatcagagtgtaggcgagtatattgtgccgggcggacgaatctatgagcagagagagtacgtctacaaggcattaaacgatataccgggaatttcggcagtaaagccaaaggcagcattttacatattcccaaagattgatactgcaaggttcaacatcacaaacgatgaacagtttgcactcgatctgcttcgtgagaagaagatactcataatccacggcggcggcttcaactgggataagccggatcacttcagagtggtatatctacctcgaacagagatattaaaggatgccacaggcaagcttgcagactttttggcttcatataagcagaaataattattggcatacataattataaaacatatgatataaaacatataacataaaacatataagctccggcacagaaaactttttgttctgaccggagtttttatattatgctgtaatattttttaaaagtaacctacctgtaactttacataatgtattatacacttgtatcgcggggcggctgcactttagatggcagaccgcacagcactcaaaaatgcatagagaagaaaaggagaattaaatggaactgcttagagtagaacacttatcaaaaatatacggagccggagaaaatcaggtcaaggctctggacgatgtgtcattgagcgtggaaaagggagagtttgtggcaattgtcggggcgagcggctccggaaaatccacactgcttcatctgcttggaggtgttgacagaccaacaagcggaaaggtgtatataaacggcactgatatctttgcaatgaatgatgatgagcttgccatattcagaagaagacaggtgggtatcatttatcagttttataatctgatacctatattaaatgtggaggaaaacatggcaatcccgatggagcttgatggaagaaaggtggaaaaggcacagatggatgacatgcttttgcgccttggacttatagagagacgcactcatctgccaaatgagctatcaggaggacagcagcagcgcacatctataggaagagccctgattacgagaccatctatagtgctagcggatgagccgaccggaaacctggataccaaagccagcaacgagattatgcatctcttaaagacctcaaaccgtgagctcaaccagacaatcattatgattacacacaatatggagcttgcaaaggcggctgaccgcacaataatgatagaggatggtaaaatcagatgaatttgatgaagacgctcacattaaaaaacttaaagctcaacaggaaaagaactattgtcacgatagtcggaataattcttgcaacagcgcttttgtcggcgcttgtcacacttgtgtcaagctttcagtacagtatgattgaataccagaagcaaaagggcggcgactttcatgtgaaattttcgaatgtgaaaatgtctgagctttcggagtttaaaaacaacagaaatattgaaagcacatttgagacaatgggaatgggctttgcaaagctagacggctgcaagaatgaggataagccatatgcatatgtcatggcaacagatgaggccggctttgagagaggctgctttaaactgatagaggggcgcatggcaaaaaatgaggatgagatagtcattccaaggcacttaaagacaaacggacgaatcgacataaaggtgggagatgagataacacttgatgtcggaaagcgatatgattcaaacaccgaaagtgtcatatcggaaaactgcgcatatgagcatgaggcagagacacttaccgatactgtgacaaagcactacaaggtggtaggcatcatggaaagaccgggctatggaatggaggactatagtgccgccggatatacatttgtcacatactctgatgaactggcagcaattgataacggcacaaagagtgaggcaagcgaagctgacactacactcacagtgtacagcagatacactcaaaaggctttaagaaacaaggatgctgtgactgcagatataattggtgtggatgataagctgtttgagaaagcaaataattcatctgttgaaatgtcttctgaggaaagtgacaggttccttaaagagatggaaaatgcaaaatatgatatatatatgaatggataccttataaactatgagtgcgttttcccgattgacggttcatttaaagcactgtttacagtggctgctgttgtggctttgataatcatactgacatcagtgtactgtatcaaaaacagcttcaacatatcaatcactgaaaaaatcaggcagtatggcatgcttgcaagcgtgggtgctacgaggcgccagataaaaagcagcgttaagacagaggcagcaatgcttggagtggttggtattcctgtaggtaccatgagtggtattttggcatcgcttatacttgtcaaggtggtaaatgcgttgtcagcaggctggcttaacgttgctttgagctttcacacatcactgccggcacttattcttgctgtgatactgagtatagcaaccatttatttctcagcaacaggcagtgcaagaagggctgcaaaggtcacaccgcttgaagcaataagaaacacaaaggagattaaaataaagtcagcaaagcttaagacaccggcgattataggcagaatctggggtatcggaggtgttatctcatataagaatataaagaggaacaataaaaagtacagaaccacagtgacatccattgtcatctgctcagtaacctttattgtgatatcatactttatgtctatggcctttagcgttgttgggatgtcatatgcatcagcagattacaatattggaataaatatgtcatgtaaaaaaaacattgatattgaaaagttctctaagcttttgagtggcattgaaggcgctgaagattatctggttggagcaggctatgatttcgatgtcagtaagccggagtatacaaaggagtatggagagtattgcaggcagctttatgatgacggtgaggatgtctcgcaaatgtttttaattacagttttggatgacaaatcgtatgataagtatgcgtctgacgcaggcataaaaaatgcagctgcaggagcaattcttgtgaataaatgcacatttgatgtgtataatgagaatagctcaaaatacgtcaaaaaagagatggagctgtacaaatataaagcaggagatacaatcgagtgtggctacaatgtgtatgatgatgcttcttctgatgataatgcagcagaaggcgatactgaaagcagcacagatgacaataatgcagtggaaggtgatactgaaagcggcacagaggataacagcggatacgttgacgaggaaacaataaataacggagtcagaaagactgtggatgtaactattgcaggtgtcacagacaaggtaccaataggttataagggctacagcaacacgctattgtttatgaaccaaaaaggctttgaaagcctatggggtgacggtaagaacggtaatgagattaaaccgggatatgcgtcatatttagcatatgtggttgcagaaaatgcagatgaatatcaggatacattcgaaaaggagacggaaggaaatcctgagtattcgcagattagtttttatgtcagcaatctggataagcagatgcgcgatgaaaagtcactctttacactgcttggagtatttgcatacggacttattgtagtcattgccttaataggaatcacaaatatcatcaataccttaagtaccggaatggagcttagaagccgcgagtttgccacattaagaagcattggaatgacagataagcagtttgtgggaatggtcaggctcgagagtgtgtttatatctgtgaaggcacttgcaataggagtaccgcttggtattttaataagctatctcttatgtgttatgatgaacaggatggatgatgcaatcatttatgagccgccgtataaagcaattatattgtgtatattggttgtaataatgctgatttatgctatcatgaaactatcaatgacgaagcttagacacaataacattattgagacgatcaagaatgaaaatctgtaggaaatgcgggagttgatatgaaaaaaatacttctcatagaggacaacaaaggaataacagagggactgtgtgatacctttacagaacctgaatatgagcttttgacagcaggcaatttaaaggaggctggggcgcttttgagtgagcaccccggccttgtgctgcttgatgtgtcgcttccggatgggaacggctttgatttttacagcgaacggctggaaaaaggaaaaacaccggtgatttttcttaccgcaagggatgaggaaaatgatatagtaaagggccttgagcttggagcggaggattacatcacaaagcctttttccgtaagggagcttgtggcgagggtaaaccgcgtatttttacgaaggaaaaatgatgacagctcatctgtcatacacgcaggaagcataagctatgatttggacaaaaaggaggcaagaagggctggacaggtgattgctctttcaagtcttgaaaaccgcatacttgatctgctttttacaaatcacgacaaggctgtgtccagaaatgccgtgcttgactgcatctgggaggcaacaggcaacgatgtgtacgaccatacagtgactgtctatatgaagcgcatcagggcaaagcttggtgaggatgtgataaagactgtgaagggaatcgggtatcgcgttgattcagatgaagctctttaaacagtatcggccgacagagacagttcccgggggaaagcatgagaaagaagaaatataatttagagaacagaaaacattttgtgtattttgcgataatttatacatgtatatgtgtgacggttatggcttttaccgtttttttccagtacagggcatatacgaaaaactataacgccacagtggctaagctatgtgcgcttattcatgaaaaatatcccgatgtatcagatggcagcatagccgggattctaaatgacagcagcttcgacagcgattatacaaatttaaaaagcgcagagccgctctttaaaaaatacggcattgatatggaaaaggattctgcggttttgtcaaatgaaaaagcgcttaaaggagcgctttggcttgacatatttcttgttgtgctttttgctgggggcttttgcctttacattgtgcttataagatttagctttaaaagacaggtcagacaggctgcggattatctgcgccgcataaatcagggagactacagacttgttatggcagatagcacagagggggagctttctatactaaagggagagctttacaagacagcaatctatttgagggagtctgcggaaaatgcaaaggcagacaagcttttgctaaaggatgcgctttctgacatatcgcaccagcttaagactccgctcacatcactttcgataaatctggaaaatctggaaggaaatcctgatatggcatctgaaaacagaaacaggataatgcgcagggcaaagcgcgatgtggacaatatatcgcatatggtgcaggctatcttaaagctttcaaggcttgaagcggatgttgtggagtttgatgagaaggatacgctgctgtctgaaattgtgtctgaggcagctgataatgttatggcactttgcgatttgagagacataaggctgtccatagatgaaggctctgataaggatgcctgtatacatgctgatgcatactggcagtgtgaggccattacaaacatagtaaaaaatgcagtggagcatgcagagagtgaggtaaagataggcttttacaggtatgagatgtatgcagagataacagtgcaaaacgatggagagaccataagtgatgaggacaaaaagcatatttttacgcgtttttacagcggcagcggacagccggcagacagcatcggcataggactttcgctcgcggaagcaattgtgcgtcatgacaatggatatatccttgtggaggattgtaaaaaagatgtattaaatgaaaaaaatgaatgcagtggcacacgctttgtggtaagatatttgtgataggttgagaaaaattatcaataaatacactaggaagcgataaaatgacactaaaagaacttggcataggacagagtgccagaatacttacagtaggcggtgagggcgcactgcgccagcatttcctggatatgggagtaatcccaaaggccgaagtgacagtaatcaaatttgcacctatgggagacccgatggagcttcaggtgcacggctatgagctcacattgaggcttgatgatgcggcacagattgaggtagaattaattgacagccgttcaagaaagcatgagggccctaaaaagataagcaacacagcccatcccggacttggtgaggagggcaaataccatgtgaagggcagtggcaatccccttccggatggtgagaagctcacatacgcacttgtgggaaaccaaaactgcggcaagacaacacttttcaaccagcttacaggttcaaaccagcatgtaggtaatttcccgggagtgacggtggacagaaaggatggctctattaaagaacatccggatacatcaatcacagatttaccgggcatttactcaatgagcccatatacgagtgaggagattgtgtcgagaaactttgtgctcgataacaagccaaaggccataataaatatcgtagatgcgacaaatatcgagagaaacctgtatctgaccatgcagcttcttgagatggatataccgatggttatcgctctaaatatgatggatgaggtgacggcaaactcaggctcaatcgatgtaaataaaatcgagggactgttaggagtgcctgttgtaccgatttctgccgcaaagaatcagggtgttgatgagctggtgcgccatgcgatacacattgcaaagtatcaggagcgcccgggcagacaggatttctgtgatgagaatgattttggcggtgccgtgcacagatgtatacacgcggtcagtcacctgattgaggatcatgcaaagctcgccggagttccgattcgctttgcggcaaccaaaattatcgagggagatgcacttatattagagcagcttcatcttgatgagaatgaaaaagaggcaatagagcatctgattgtccagatggagaaggagcgaggccttgacagaagcgctgcaattgcggatatgcgctttacatttattgagaaaatatgcgagagcaccgtggtaaaaccgaaggagagcagggagcgtatcagaagtgagcgcatcgaccgtgttcttacaggcaaatacacggcaataccgtgctttatagtgataatgcttgctgtattttatctcaccttcaacgtaatcggagcaggccttcagtggcttttggagcagggcataggagcactgaccgcgcttacggataaggcactcacagcggcaggcgtgaatgaggtgctgcacggactggtaatagacggcatctttcagggtgtcggaagcgtattaagctttttgccgattatcgtgacactgttctttttcttatccctcatggaggacagcggatacatagcgagggttgcattcttcatggacaagctccttcgtaagataggactttccggacgaagcatagtgccaatgctcataggcttcggctgtacggtgccagctgtcatggctacacgtacactgccaagcgagagagaccgtcgaatgactatactcctcacaccgtttatgagctgttcggcaaaattgccaatttatgcattctttgttagtgcatttttcccgaagcatggcggacttgtcatgggaggactgtacttcattggaataattgtcggaatacttttcgcatttatatacagaaagactttgttcaggggtgacgcagtgccgtttgtcatggaactgccaaactacaggatgccgggcgccaagaatgtgtgccagctgctctgggaaaaggcaaaggactttttgcagaaggcatttacagtaatacttattgccacaatgcttatatggttcttacagagctttgacatacactttaacatggtaacagactcaaaggacagcatgcttgctgctatttcaagtattatcgtgcctgtctttaagcctctgggactcggcgactggcgtatatgcacgtcacttatcagcggactcatggcaaaggagagtgtggtatcaacactggagatactgtttggaggaactgttacgacagcactcacaacactttcagccgcatctcttctggtgttctcgctgctctacagtccttgcgtggctgctatagcatccataaagagagagctgggtgcaaagtgggcagtcagcgtggtgcttttgcagtgtgcgattgcatgggtggcagcatttattgtaagagttattggactgcttgtgatgtaattaaaaacagactattcagaaacactgagaaccaaaaagatgatgtgtcatgcttgcatgtaagcaacaggttttcttgttctcaaggtggttctgaatagttacaaaaaatataaaaggagatatgtgatggagattaaactggaaaatgaatcacttgagctcacgataaacagcttcggagcagagcttaaaagcatcaccggcaaggaaactggtacacagtatctgtgggatgccgatgagaaatactggaagagaagcgcaccggtgcttttcccgtttgtcggcagcttaaaggacaagaagtttaccgttgatgggacagattatccgatgggacagcacggctttgcaagggatatggagtttgagcttgtgtcacagacaaaggatgaggcatggtttttacttaaatcaaatgatgagactcttgcaaaatatccgtttgagtttgtgctcgaaatcggatataagctctcaggcagtgagataaaagtgacctggatggtgactaatcctgcgaaaaaggatttacttttctcaataggtggtcatccggcatttatgtgtccgatcgcagagcagggaaagcagtcagactattatctgaagcttgacacagacaaagcaatcacctacggacttatctgtgacggaggacttttagacaaggaggacaatctgcttaaggtggatgtggatggatactgtcagatagatgagcatatgtttgataaggatgcgctcataatagaaaacagacaggcttcaaaggtgagcctgtgtacaccggataagaagccatatcttacggtgtcctttgatgcgcctttatttggtctgtggtcaccggcaggaatgggagcaccgtttatctgtattgagccgtggtacggccgatgcgacagagcaggctttgccggagaattaaaggacagggagtatggtaattcgctggcacagggtgagaaatttgagaagtcatatacgattgaaattgagctgtagattttcttgttctctggtggcttaaatacttattaaaataataatataagacataattagaatcatggggctgcggtatattgcagtcccatgatttttagatagtaaggatttttcacgaacttgaaataatgtaatgtaggatagcataacgctatatgtgccttgatgcacctgctttcttcaagtttgcctgaagcagccatttctgatcaattttcttaagatcttcaccgaatctgacatgtagccgaactgagccttcgagctgctcgatatgttcaatggtgcccttgccgaactttggatgattgacatcgtcattgatattaaattttacagtactgtttttctttttgtggtattcctgctcgcgtgaatatgtgtcgcggataggaatactcttgtcagtaattttctttttgagaaccttatcataatcgtgcttaataagtccctcaccggctttgtagtaaggagtgggagctgctccgataagtgagcaacagtatttccacgcacttccgtggatgccgggctgccagttgtatttgtccgggatgtccatattgtactgcatatagtgggcatattcatgcttatataaatctatcctgtcatcttttgacaagggctttgtcacacagtagccgatgaaaagcagcgaaaaatgaaattcttcttcatcctgcccaaagcccggagtgtatgcaccgagcctgtccgtatcaaagccaaatgagataggaacccttgcaccgttaagcctaagctgtctgtcgagcttctggtagagaaagcggatttccgcgagatgtatttttgtttcgttttcgagtagttgtcgtaaattgttgtttatgttcataagtatatttatcaaaaaatcagtttgttttcaatacagtaatgatatattccgtcatcctcaactgatttgcatacaaaatcagccttggccttgacttcgtcctttgcattgcccatggcaacacccatacctacggcctcaagcatttcaatatcgttatgtccgtcaccgaaagcaattgcttcatcctttgagaagccataatgcctaagcactgcagcaacagcattgcctttgccactgttaagcggaataatatcaacggccttatcccaccatgcagttatctgtgagtggggcgcgccggatagaatctgtgagtgctcatctttttggcaggagcacataatctgatagatatcagttttgcttatgtcgtcaaaattgtcagcaattttaagcttttcactgccgaaggcaaagtactgctctaaatcagggtcagtaccgtttgtgacaatcatatgctcgttgctgattgcaatggcgcggttcatttgctttagattggaaattatctgatatttgtcgtgctcattaataggatttttgaagatgatatcattgcctttggtgacgaatgaaccgttaaaggtgagcaggacatcaaaatcaattccatcaaaatgaggcacacctgtgtagcctcttccggtagccatacaaaggatgatgccattttggtggagctgcctaagtgcagcagcagtgtttgctgataattctttatgtcccagccgaagcagggtgccatccacatcaaagaatgctattttaatcataattcacctgcctgttttactgaatttcaataatatttcatttactttaatcataacataataagcgcaagattaaaaacatttatttaaatttctgccacaacgtaaggtacgtaagccggggactgaggggacacatgcgctttagcaggagttcatagacagatttattgaatgcacaactactaataatatggttgatgggcaggaaatacagaattgctcaggaagtcagatttcaaatgaatcaagaagtaactatatactcggaaaataccagtattacagaaatctgtacggagatcaggagatatagaatatgataatagtgaactgctaggttattcaatagctgagtagttcacaaacatactctatatagattataattaattggaggaaatatgagcataggatttaacggtgacacatttaaatgcaggtatcctgctgtggctggctttccacagccagcgtttgagttcatcttcagcttcatctacgtttgtaagctttagtaataaccggagctgttcccaatgcgtaagcagagccttttatctcatccgccttagctttagctgcttttacaataggcaaattcaggatcatcctttcttatcagagtaaagattacaattttttataactgtgtttttaacattaaggacatttttgaataatgtattaactgaagccacttttgaatactctttttgtgtttttcttcgcagttaatacattaaaggacacaagtggttttttcaatatgttgttgttaatttatgttgttgggcttccaccattatgccagaagtctcgcaaaaagtagctgaaactgcagaaatcaccaaaacagcaccacaaacccagctcaaaagccggagaaaagccgagaaaaagtagctgaaactgcaaaaaacccaaaaacagcaccctaaccccagccataaaggactccataaagccggagaaaagccgagaaaaagtagctgaaactgcagaaatcaccaaaacagcacccaaactcagccaaaaagcctcataaaaatggacttatagacatgtattgatggcttagtcgagaattaactactgtggagtgtactagaacttgtgagtagcgtgtcattttgtaaccgccaaagcgtacacaatgaagcagtaactataaactgtgagattatagcaaaccatctagcatatacatttgtataagtttcgatggtttcgtcgtgcatagaaaacctaaaagcataatttcgtacagaatcttagtcacgaagcgtagcgagggcgaaagtgcgtgtctccccaacagtccacggcttacgtaccgaccggcgaccaatgcgcaaaagttgcgcgtaaaaacgcgcaccccatcccttatttgtgaaaaatgcttgaaaacaaaaatttaaaaatgtcgaaattgcacattgacataatcgcaatgctgtaatatactaagtttagaacaaacggttgcgcgaaaaaacgtacctaagaaataaattaaattacaagcaaatggaggaaacaacggatggacaaatttattgttaacatcattcaccgccctgagatggtgcctgagtactcagcaacagtgacaggacagggaaaagaagaggatattggagataagaagcttatcacagagtcactcgacatcttcaagacacagcagagacttgcacatgaggcgggactcaaaaccacaatccagatgacatatgcttcgctttttaatgatgaggcagtagagcttgcaaagcaggatcacgagaaatacggtgatgagatagcactttcactccttggacttccatgtgaggagtttagagagaagtataagacaaaggatttctgtatctggatgttctcaatggaggacaagaaagctatcgtaaatgatgttttcgagaaattccatgacagattcggtttctatcctgagtcaacaggctcgtactatatggatgcagaccttataaactacatcaaagaaaaatacccaatggtaaaatgtgcagttgcaacatgctgggaggagggtcctaaggcataccacacatgtaacaactcatggtacacactcttcgacggaggcccatgggcaccatggattccatcaaagcagaacacacatgcgccagcagcaaataaggaagaggatagcggaatcgtagcaattccacatctctcacgtgaccttattgcatgctatgacggaaacggctcaaacttcggaacacatccacagaacgtgcttcgtggaatgatttatgatacaaagacatgggagtatccatatctttataacctcatcgaccagtacagagaccttgcaaaatacaataacggatactcatacaacatgatgttcgtaggacctggctggatgaacaagatgggacgctgggagcagccatatgagcttctcttaaagtcatacacagacggctgtaattactatggcaagttaaagaaagagggtaagctcatcgacatgacaatgtcagagttcgctgattacttcagagagaagaagggtgtcaacgcaggtaactacaatgagcctgagtgtgcaccatggagagatatcctttacggctcagataagcagctcttctggtactgtgacccatacatgagagcatgcgtaaacatggatcaggggggagcaatcgtagaccttcgtccatacgttgcaaagcttgagtggccggtaggaatcggaacaaagcatgtacaggatgcatcttatccattccttattcaggagaaatacagagcaggatactttacacactatgcaggagctggaacagtaagaagtgccaagctttcacacaacggtgaggaggttgacctgtgtctctgccctacacacagccatttttcagaggaagttattgatggcaagaagacaagaatccttacacttgatcctgtagatattgagttttatgatgttaagcttactcttcagacaaaggaatactttgaggagggctcatcaaacatcaagattgagcgtaatatccttagcatgagtgatccaaatgcagaggtttatctcgatgagtacatcacagcatgctacggaacaacagagtatccagaggatatgacaggcatcacacttacatgtgagggagaaaacccacagagcatcaattatgagtacaagtgtcgtgatgcaaagcttgacggagcaactgcagtaagcgcagtaattcctgcaattcagacaaaggtttcactcacaccatctgcaaaggcagagggatacattgaggaaggatatgcattctctccaatgttcaagcttggttacaagaaacagattaaagacaaggaggtatttgcaacatggctcaacttggaaaaggcaaattaaattacagatgtcctttatgttttatgagggatcttgatattgatatgttctataataaggaaacgggtatttatagctgcatccgctgtcaattcagaggtacagaggaagaggtgcttcagggcaacgaggatgtccgcaagaagtacaaggctatgtacaagagattcgacaagttcgattttgattaaagtagtgattggtgcgctgctgctataatagcagcagcgtatttggcatttcgctgcaaaggagagtatatatggcgaaaagaaaaaaagacacgatggaattcagattctatgagctgccacagggagaatcggcacttgtgctgtgcggagaatcctggaagagagtgtatggtcatgaggaatttcacctgcatttccataatctgcttgaaatcggcatctgccgcgagggagatggaaatatgtatctggatgaggatatttaccagtatcatgacggcgatatcacatttatacctgagaattttccacatgttacagtcagctatggtgaggtggtgaatttctgggagtacatttttattgacatacattctgtgatagaagagatgttcccaaacaatgcggcattccagaatgaggcagttacgactatatcaaaaaaagcgtttatgaccaacgtgtatcagagcccggctatggctgagtatataaatgccataatcagggaaaccagtgagcacaagatttattgccaaaggacgataaagctccttgtgcagggaattgtaatagagctgttgcgcatgtatgatgagcttccggaggaggataataatatcgtaaagggtaccaatatgtcacagatagccacagcacttgactacatgaataagcattacagcgaatcgataaaggcaggggagctttcggcactatgcaacatgagcgagactcatttcaggagactgtttgaatcatacatcaatatgccgcctatggagtatctgaatctgataagagtacagaaggcgtgcgagcttatgaaaaaaacaaatgagcctatggagcttattgcacaaaagtgtggattcacaacccagtcaacttttaaccgtaatttccgcaaatttttggacacttcgccatatcagtggaagataaatcctgaaaattatgagcataagctgctgaattttaggatatctgcactaaagggatggtagaaaatacatgttttcgtataattttgtacatttatgattgaatatgcatataattgtgtggaatttgttaacacagaaacaccgtatatggttataatgactatgtaatcaagaaacggacaaacattcgtagtcaaaatgcccaatcaaaataatatgattatgaatgaattgtaaacgtagtattacagaaacagcattttttattagggaggaagaaaaatgaaaaagaaagtagtttcattattactcgtaacaacaatggttgcctcacttgcagccggatgtggagactcatcttcatcaggagatggcacagagaagacaggcaagaaggtagagacagtagatgacggtcacacacttacagcctgggcttgggatacaagcttcaatatcccggcactcaaagcagcagcagaggattacaagaaaaatgtagatcctgattttgtactcaatattgaggagcagtcagggtcatctgacattgagacagcaattacaacagcaggctcagctggggattacagtacacttcctgacatcgtattattccaggatcactacttccagcagtaccatacaaattatcctgatgcatgggtatcagcaaatgatgcagatgttaagtgggatgatttcagccaggagaaattatcattctctacaatcgacggagagcactttggattccctgttgataacggaacagttatctttgcttacagaacagatcttcttgagcaggcaggatacacaatcgatgatatgacaggtatttcttggaaggatttcatcgaggtaggtaagaaagtatacgagaagacaggaaaatacttactttgcatggacggcgacggaaacgatttattctacatgatgcttcaggcagagggtgagtcacagttcaaggatggcaagccaaactttgtagacaacgctaaattaaaagaaatcatgcaggtacttaaggatatgatcgacaacaatgttctttaccttgcaaataactggtcagattacacagatcaggttattcagggagacatggttgcaggcgttatgaacggaaactggatcattcctacaatcgagaaggttacagacaacagtggaaagtgggagattacatctcttccaacacttgagggtggtgaaggctatgcatcaaacggtggttcttcactttacatcacaagcaactgcaagcagacagaccttgctaagaaattcttagcatatacgtttggtggcggatcttatacagacaagggtgtatctgagacatatgacaatgctcttaagaatggtggtgttatcactacatatacacctgcaggcaagtcagaggtttacaacgagggcgttgagtacttcaacaaccagccaatttacgctaagatcgttgagatgggtgcaaatgttaagacaatcgagcagagcgatttccattacgatgcacgtaagaagcttgctacagcacttatcaatattactcagaacggtgcagatatcgattcagagataaagacagcagaggatgaccttaaattcacaatgggactttaatctgttaacttgatggcaaatgtacagggagccattaaatggctccctgttttttctcaaagacgtatagttaggaggcctttacagtgaagaataagaaaaaaggaatgagcataaccggtaaacaaagggttgccggctggatttatctggctccggctacaatactcattttcataatgagcttctggcctataatccaggctgttattacatcctttaaaaccggctcaagtgcaaatatgcagtgggcaaatccacttacttacaactacacaagaatgtttcaggatgcggttttcaagagatctatcggaaacacattcctgtatttaattatcgaagtgccaatcatgcttgtactggcaattttactggcacagttacttaacaacaagcatcttaaatttaaaggacttttccgtacatgtgtatttttaccatgtgcaacatcactcgtatcatatgcattgatttttaaatcgctttttgcaacacagggacttatcaatacaatccttgttaaacttggaatattagagaacaactttaacttcctcggtacaggctggagcgctaagattattatcatagtagctcttatctggagatggacaggatataatatggtgttctttttagccggtctgcagaatatcgagtattctgtttacgaggcagcaaagatagatggagcgagcggctggaagaccttctggtctatcacggttcctcttcttagacctacaattgttatgacaaccatcatgtcaataaacggtacattacagctcttcgatgagtctgtaaacctgacaaagggtggacctgcaaatgcgacaatcactatgtcacattatatctataacggctcgtttggtgaaggtgttgcaaactttggatatgcatcagcaatgtctgttatcgtattcatcatggttgctatactggcatttatcaatctgaaagtaggtgacaagcgtgactaagaaaaaacatggatcatcaatacaaaaaaggcttataccttcatacatttttcttgtaatagtttcgttcatctcagtatttccgtttttctggatgatatcggcagcgaccaacaagtctattgacgttgcaagaggtagaattgcatttggtggctatgccattgagaacttaaagaaactgtttacatcacagaacgttgcacttggaatgaaaaactcacttatcaatgcaacagttcagacaattatagcactgcttgtctgctcacttgccggttacggctttgagctctatcatgacaaggcaaaggataagctgttctcagttttacttcttgccatgatgattccgcaggtagctacacttattcctctgttcaagatgatgtcaaagctcggctttataaatacggtatggggcttcatgctcccggctatttcaacgccgttcctcatcatgatgttcagacagaattcgagaaacttcccaatcgatataatggaggcggcacgaattgacggactcagtgagattggtattttctttaagatgtatatgcctgtacagaaatcaacatatgcagcagctgcagttattacattcatgaatgcatggaactcatacctgtggccaaaggtaatcctcaataagcctgctgctatcacaatgccaatgcttattgcaaaccttgcagcaggatatacagtagattacggtgtactgatgatgggcgttcttttctgctccatccctacaatgctcgtattctttgtactccagaagcagtttgcagagggaattacaggatctgttaaataaaagtaaaataatattgttaaaaattaagaaggcaaataatgtttattatttgccttcgtcttataagagggctttgtgtttaaaacagacatgtatcaaataataaatacagtagataggagtgtaaaaatatgagtgattttgattcaaatatcattaagaatccggaaatatttgagcagaacagacttgcggctcattcggatcatgtatgctataaaaatgaactggagaaaattaaagggaaatcaagcctgagatatgatatgaacggcttatggaagtttgcatatgcaaagaatcagtccctggctccttgtggctttgaggcagctgattatgattgcaaaggctgggatgaaatcagggttccggcacatatccagatggaaggctatgacgtgccaatctatacgaataccacatatccgtgggaggctgatgagtctataaagccgggcgaggtacctgagatttttaatccgattgcaagctatgtgaagtatttcacaatacctgagaatatgaagaacaagagggtgtgtatttcgttccagggagtggagagcggttttgcactctggctgaatggacactatgtcggctacagtgaggacacatttgatccgtctgatttcgagctgactgattatattattgagggtgagaacaagcttgcggtcagggtatggaaatggacatcaagcagctggtgtgaggatcaggatttttacagattttcaggcattttcagagatgtatttttgtatgccgttccttgtgcacatgtggaggatctgtcagttgttcctacacttaatgatacctttgacgagggcacacttagtgtgtcaataaaggcagatggtgatggtattgcaagtgtaaagctttatgagctgggcgatttgtctgtggaaaaatatgacagggcaaaacttttattggaagagtttgatatagagcttaggaataaggaaatttgcgagggctcatgtaatgtgaaaaatcctctgttatggagcgctgaaaagccgaatctgtatgaggttaaaattatagttaaagatacgcatggaaatgagaccgagtttatcagccagctggcaggcttcagacaatttgagatggtagacggactcatgaagctaaacggtaagcgtattgtatttaagggtgtaaaccgccatgagttcagctcaataacaggccgtgtgccaaaccgtgatgaggtgataaaggatattgtcacaatgaaaaagaacaatatcaatgctataagaacaagccattatcctgatgattccatgctctataagctttgcgatatttatggaatctatatgatagctgagaacaatcttgagagtcatggcacatgggaggcatataataagggctatgttgaccttgactttgttgtgccaaaggacaagccacagtggagagaaatgatgctggaccgtgccaactcatgctatcagagggataaaaatcatccggcaatccttatttggtcatgcggcaatgagtcgtttggcggcaagaccatatatgagatgtcacagcttttcagacagcttgataagcatcgtctggtgcattatgagggagtatttaacgatagaagctataatgacacaagcgacatggaaagccagatgtatactccggctgcaggcattgaaaaattcctggcagagcatcctgagaaaccgtttatctgctgcgaatatacacatgcaatgggaaattcctgcggtgctatgcacaaatatacagagcttacagaccgcgagcctagatatcagggcggatttatctgggattatattgaccagtcaatctataaaaaggacagatacggcaagtggttcctcacatatggcggagatttcggcgacaggcctactgatggtgatttcagcggaaacggcatctgctacggcggagagagagaggcttctccaaagatgcaggaggtgaagtttaattatcagaatatctcggttgattttgacagcgactacatctttacagtcacaaacaaaaatctctttgtaaatacatcggtttttgatgcttttgccattcttcttgcagacggtgaggaggtttacaggacaaagcttcagatatctgttccaccgatggatagggcaagctatgaggtgccggtgactcttaaaaattccatgatagatgcggaaaaagagtactgtattgtcatatcatttgtattgaaggaaaacaccatctgggaaaaggcaggatatgagattgcattcggacagcatatgataaagaagcctgtaagtgagtattcatgcgacaaatcagttgagcttgttgttggaaacggaaatatccttgtaagaggtgagaacttcaaggcacttttttcaagaatgaatctgggaatggtttcatatgtatacggtggcgtcgagatgcttccaaatactattccactgccgaatttctggagaacacctactaacaatgattccggcaacatgatgccacagcgctatgcacagtggaagattgccagcatgtatgtgaccaccagacagaatcagcgctttgcagatacatcaccaagggtagaaaaaaatgataacaatatcgccatcacatacacttatttcatgcctaccacaccgcagagctcatgtgaggtgacatacagagtgtttggtgatggaacaatcgagacaactctgtcatatgaccctgtaaaggagcttggcgatatgccggagtttggcatgatgttcaagctggatgccgattatgatacagtgaaatggtacggactcggaccacaggagacatacgaggacagacagcatggcggaaagtatggtgtatacgagaataaagtggcagacaatgtcgcagagtatctcgttccgcaggagagcggcaacaagtgcagagtaagatatgcaaaggtaatggataagaagggcagaggcatgctgttctttggtgatgagctttcgttctcggcactgccatatacaccacatgagctggaaaatgctgcacatcatttcgagcttccacctgtacactatactgttgtccgtgtggcaaagaagcagatgggtgtaggcggagacgacagctggggcgcacatactcatccggagtacctgcttgatgtctcagagaaaatggaattcacattctgtttccgcggaatttagcattttaaggttgtcaggaatattattacgcattttgagagcagggactactactggtactgctctcatggtgtaaataaacgatataagaattaaggagaattaaaatgtcaaagtttattaagggtatggatttatcaaccttgctagagctggaacgctgcggagcaaaatactacgaggacggaaaggtgaaggatattcttgacatcatgaaggagcatgatgttgacacaatccgtcttcgtctgtggaacgacccaaaatcagaggatggtgagccttacggtgcgggtaacaatgacctggctgagactattgctatcggaaaaaaggttacagatgcaggctttggagtgcttttgaatttccactacagtgatttctgggcagatccgggaaagcagattaagccaaaggcatggaagaatttcggtgtggacgagctggagcaggctgtatatgattttacacttgaaaatctgacaaagattattgaggcaggtgtaaatgtcacaatgattcaggtaggtaatgagctttcaaacggacttttgtggcctgagggaaaggtacctaactacgataatatagcaaaatttgttaatgccggaatacgtgcctgccgcaaggtaaatgctgatattccgattatgattcacctcgataatggtggaaacaatgagctttatgtcagatggtttacaaacttcatcgaaagaggagaagagtttgagtatatcggattgtcatactatcctttctggcacggctctctcgatcagcttgagttcaatatgaacgatattgcaaagcgtttcaataaggaccttatcatcgctgaggtatccatgggctttacaatggacagctaccaggagtacgagaagcttgctgattctgagcgtaagggttatgcgacaaaaccggagcttgtcgagaagatagattatcctatgactattgagggacaggctgactttacaaaggatttcttaaacagagtggcaaatgtggtggatgaccacggaaaaggatttttctggtgggagcctgcgtggattcctgtaccgggctcaggctgggctacacctgcttcgcttaagtacatgaatgatccgggaccatgcggcaatgagtgggcaaaccaggcgctctttgactatgatggaaatgtgctgccggcacttgatgttattaagtgtttcaaaaaataattacaaagaatatatgtaattttgttgcatgatttgacttgttatgttgcattttcagttggatgtattgcaatgtaaaaatgtgcagttataatagagttataaagaaaaaacgaattattttaactatcaatttaacgcaaatacaatcagcaaaggagaagaaaaaatgatacagcagaacgtattagacaaattcaaggagctttttggagcagatggggatatcagagtatattttgctccgggacgtgtaaatctgatcggtgagcacactgactacaatggaggacatgtgttcccatgtgcacttaccatcggcacatatatggcagcaagaaagcgcgatgacaggaagcttcgtttctactctatgaattttgacaatctgggtgtggttgagtcatcacttgatgagtttacacctgatccggacggactttggataaactatccaatgggcgttatgtgggccttcgagggacgcggaatgaagcttgaaagcggtcttgatattgttttattcggaaatattccaaacggctcaggcctttcttcatcagcatctcttgaggtggttacaggatatatgttaaaggatatttacggctttgacgtgacaaatcaggatattgcacttatcggtcagtattcagagaacaactacaacggctgtaattgcggtatcatggatcagtttgcatctgcaatgggcaaaaaggacaatgcaattttccttgactgcaatactcttgattttgagtatgcaccaatcgttttggatggtgcaaagatcgtggttacaaacagcatggttaagcacagccttgtaacaagtgcttataatgacagaagaaatgagagtgcacaggctcttaaggatttacagacagtatgtgacatcaagactctcggtgacttgacagatgaagagttcgaggctcataaggatgcgattaaggatgaggttgcacgtaagagaggcaagcatgcggtttatgagaaccagcgtaccatcaaggctgttaaggcattaaaggaaaatgatattgagacatttggaaagcttatgaatgcctcacatgtatcacttcgtgatgattatgagacatcatgtcctgaggttgacgtacttgttgatgaggcatggaagattccgggtgttatcggatcacgaatcacaggaggcggatttggcggctgtacagtcagcatagtaaaggacgaggctattgatcagtttaaggcaaacctgacaaaggcctatgaagagaaggttggaaagacacctgagttttatgttgtttcaatcggagacggacctagccgtctggcataaaattagcaatatgaaataacagtaacggataaataggtttttcccgacaatgattaaggagcatgacatgattcaggagagaatattagaattagtaaaatatggtcttacaacaggacttgttgaccctgctgatgaggtatacacagtaaacagacttctcgaggtactcggagtggacgacatcgaggatgagacatttgaaaaggtagaggctcagccggcatggacacaggaagaggcagaggagaagcttgagggtatactcgaggatatgatgacatacgcatatgacaatggcatcatgaaagaaaacagcattgtatacaaggatctttttgatacaaagctgatgggctgccttgtaaatgcaccaagcgtgatcagagctcgctttaaggatttatacgacaatgagtcttcacttgcggcaaccgattatttttacaaattaagctgtgacagcaattatatcagaagacagcgcataaagagggatatgaaatggaccacagacacagagtatggcacacttgatgtgacaatcaatctctcaaagcctgagaaggatccaaaggcaattgctgctgctaaaaatgctaagcagagcgcatatccaaagtgccagctttgtaaggaaaatgagggctatgcaggccgcgtaaaccatcctgcaagagaaaaccacagaattatccctgttacaataaataacagccagtggtttttccagtactcaccatatgtatactacaatgagcactgtatcgtgttcaattcaaagcatacaccgatgaaaatcgagcgtgccacatttggaaagctgcttgattttgtgacacagtttccacattattttgtgggctcaaatgcagatctgccaattgttggaggttctatcttaagtcacgaccatttccagggcggacactatacattcgctatggcaaaggctccgatagagaaagaaattacattcaagggctacgaggatgtcgaggcaggtatcgtaaaatggcctatgtctgttattagaatcaagtcagcagacagggataagcttattgaccttgcagataagattcttcttgcatggagaggctatacagatgaagaagcatttatttttgcagagacagatggagagccacacaacactatcacacctatagcaagacgtcgtgacggagactatgagcttgaccttgtgctcagaaacaacatcacaacagaggagcatccgcttggcgtatatcatccgcatgcccaccttcatcacataaagaaggagaatatcggacttatcgaggtaatgggacttgcagtgcttccggccagattaaaaggtgagatggcagagcttagggatgcaatccttacaggaaaggatctgcattcgactgagactcttgcatcacatgctgactgggctcttaagtttatgtctaagtatgataagattgatgagtctaatattgatggtatcatcaatgaggagattggacttgtatttaaagaagtgcttgagtgtgcaggagtgtacaagtgcactgatgagggacgtgcagcgttccagaaatttatagatgcggtaaacttgtaatatattttttataaaaacttgccccagcgtccatgctggggcattgttgtatatggacataattctaactgcttttaagctgctttgtaaagctcaatatatagtatgttcgccggtgctttcctcggccgtgagataaatttactgcttttgcagctcatgcaggcagtggatgaatgcaggcaccaggaaggcatctgcgagaatccatgcgagtgggcttgcaaagcaggcggcagaaaagccgaatatcggtacaaatacaagtccgatgagtgaacgcgcaatcatttctgctactcctgcaaacatcgcaaagccggaaaaacccatgccctgtatggtgaaacggactgtgtttaccagaacgagcgggatgtagaaaaatgcatttatcagcagaaactgatgagcctgtacgacaacctctgtttcgcttggtgatacaaacaggtaaatcagatagttggctataaacggcagtgccacaaaaatcaaaaccgaatagatcgatcctatcactgaggctgaaataagccccttctttacacgttcaaatttggttgcaccgacattttgtccactgtaggtggccattgtggagccgagtgcgtcaaatggacacaccataaacattgaaatacggcttgcagcggtcattgaggcaactgcgatggagcctaagccgtttacggcagtctgcagtatgacgccgcctatagcggttatcgaatactgaaagcccataggaagtcccatgaccatcagatttctgacatatgaagagtcaagcttcaaatcatttctgcttacatgcagcagaggtacattttttgctatgtaaatgatgcacagcactcctgatataccctgtgacagtacggttgcaaaagccgctccaaacacgcccatgttaaataccagaatgaaaagtaaatcaagaccgatatttagaatagccgcgattataaggaaaataacaggtatgaccgagttgccgagagatctcagatatcctgacagcagattgtacagtattgtggcaggaatgcctgcaaatatgacaatcagatactggtaagcgaggtcgtaaatgtcgcctggcgtattcatccaggtcagaatgtgaccgcagagaagcacagtgagtgccgtcatgattattgcgataattacagacacaattcctgcatttcctacatattttttaagtcctttttcatccttggcaccaaagcgctgggctattggaagtgaaaagccggcacacacaccctggcagaagccgatgatgagaaagcagatgcttccggtagagccgactgcggctaaggccgaaacacttagaaaacggccgacgattattgtatccataaggctgtaaacctgttgaaaaagcattccgagaagcaacggaagggaaaagcccagaatgagcccggtaggagaacctacggtgaggtcctttgaattgtttttaaacattatttataaatcccctttgattaaaaatatatataaaaaatagtagttaagtgtaatatacaacctttacaaacataagtaaatgaggtaaagtaaaattgttagcatttttttgggtgcatattttaaagtgaataaaaacgctgattttatgtttgatatcatgtttttttgagaagaaaattgaatgatcagtaaatatgtatgggctgacatataattaaatttggaggaaaagaatgagagactgggaaaataacattcgaagggttgtaccttatacaccgggagaacagccaaagaatacctgtgttattaagttaaatacaaatgagaatccatatccgccagcgccgggagtgaaggaggttttaagtaatttcaatacagatgatttaagactgtatcctgatccaagggttgataagctggtaaatgcaattgcggatttctataagatagacagctcgaaggtgtttgtcggagttggctctgatgatgtacttgccatgattttcatgacatttttcaattcaaaaaagccgatactgtttcctgatatcacatattcattttatgatgtgtgggcagatatgcttcgaatcccttatgagcagcttccattgtctgatgatttttcaatagtaccgtcagattactataaggcaaacggcggagtagtatttccaaatcctaatgctccgacaggaaagctcatgcctcttgatgagatagaggatataatagagcacaatcaggatgtaattgtcgtggtagatgaggcatatgtggattttggcggggagagtgcgcttccgttcattgacaaatatgataatgtcatcgtggtacagacattctcgaaatcacgctcgctggcaggatcaagagttggttttgccatggcaaatcctgtgcttatcaagtatctgaatgatgtgaaatattcgttcaactcatatacaatggacagaatcacaatcgaagcagctacagcagcggtaaaagacagagcatactttgaagagaccacagcaaaggtcataaagacacgtgagtggacaaagaaagagcttaagagacttggatttacattctgtgactcaaagagcaactttatatttgcaaagcctgcaaatgtttctgcaacaaagctttttgaggaccttaaggcagacaatatatttgtcagacatttcagctcacctgagcgaatcaacgactatctgcgcatatccataggaactgatgagcagatgcatacactaattaaatttttggagaattattcatgttaaaaaaatatatttacatctttttaatttcaatgataccacttattgaactcagaggagcagttccggtttcacaggtgatggggctgccgatagtgccatcatttatcgtttgtatcattgcaaatatgcttccggtaccaattatttatctttttgcaagaaaggttctcatctggggagcagacaaaccaattattggaaggttcttcagcttctgcattgaaaaaggagagaagggcggcaagaagcttcaggcaaaggccggaagaggtctgtttgttgcacttttacttttcgtaggtatcccacttccgggaacaggtgcatggacaggaacacttgcggcaagtatccttgatatggatttcaagtcaacagttgccgctgtcatgcttggagtactgcttgcaggcatgattatgatgatagtaagtctggcaggtgtgactatattcttgtagaatttatggggagctttcttcgtcctttgttaaacagtacaaatccgaccaccagtgaaacaattgtaacagcaatcacaatcacaaagaccactgcactattaccgggatccgggaaaaatcctgaaagtgtgccccaaagattgaaaagcagatgaagccccatagagtagtaaatagagccaccgcgttcgcacacatatccgagcactatgccaagtgcaaaggcatatatgccctgaatccagttgagatggaacagtccgaaaagtgcagcctgcatcagattggcaagagcaaatggcaaagcctttctggcacagcgcatggttacaccgcggaatataagctcctcacagattggcgccagtattacagaataaagtactgttataaaggtggtatctgtgatgccggatgtttcaaaaagcttgttgtactgctgcagccagtcgggacgaatgtagccggttaagttagcgatgaaattggcagcaaactgtgtacccggcacgagtatgacgattgccacaatcatcatgggattgaaggttttcttaggggatggaagaaaactaccttcgtatctggcatagtaccacatgccaaaaatcgcaatggtaatgagtgcatagatgaccataatcatcatgttaaaatttacagaggtaaatgtcttttcaaggcggtccgatacgtttgcagacggaaaagcaagctttccgacaaaaccctgtccaaacactcccatgcccatcataaagaataaggcgatagtctgaattgcctcaactgcaagcagtgggacaaatgtgtaaaagaaatatcctacttttttcattttcaatttactccattctgatttattaggcgatagtaacattagtataacatatcataatttaattgcaagaaagctgtttactttaaaactttaatatgttaaaattaaatgtaaataaatcgcatgaaaaaggagaacacgatgagcaagaatcttaaaacagaagcagtagaccatttgtttgatgctattttgtgtctcaaggatagagcagagtgttatacattttttgaggatgtttgtacagtaaatgagcttttttctctatcacagagatttgaagtggcaaagatgcttagagagcagaagacatatcttgatatagcagaaaagaccggggcttccacagccacaatcagccgtgtgaacagatcattaaactacggcaacgatggatatgatatggttttttcacgcatggaggatggctctgacaaagaggattagtttatcatagggggaaagaaaaacaggctcattaatttgagcctgtttttttactttcctttcctgaatgtgtattttcatgggaagaagcctctttttcttcatttagattgtcaatcatgcgctcaatcagcattttcttgatgtagacatcaaagctcagcatgcagataaagctgaatgtgtgaagaaatttctggtcctcatcaggaaaatcctcaaatgtttcaccggcaatcttgtatttcttgccgagatcctttaagagcttctgcgattcctccgcctctaagctgaaaacctcagtatagacatcctgcatcgtaaatccgtcatcattgccgaaatacttctcggtaagcggattaagaatcgagcgtatatcgttgatgctcaatatatttttgaaataatatataaaaagcagtgtgagcacatgctccttagaatactttttcttgtccggagaagggagcagattgttttttgcatagttgtttatcattgtcttggtaaggattttgtcactttcatagcgctttgatgcagcgagctgctcgtccatgaaggttgtgacctgatccatgtacagatcaatatttggtatatcctccggctttatgtaatctattgatttaagctgttttaataattctgataaaaattctttaacgtcattctccatatcatcacctcaggcttttattatatagtattgaaaactatatgacaagttttttttgaattttctcatattgggttgtgcaaaacatatgtttgtggtatgctgtagataaattatttttgtatttatggtttgtgtgcctgtaataagactggagaattgagaggaaaacagatgaacttagatatgttgaatgaacagcaaagggaggccgttttgaccacagagggaccgcttcttattttagcgggggcaggcagtggcaagaccagggttcttacatacaggactgcctacctgatagatgagtgtggcgtcaatccttacaatatcatggcaatcacctttacaaacaaggctgcgggagagatgcgtgagcgaattgatgatatggtgggctatggttcggaaagcatatgggtttctacattccattcgacatgtgtgcgtatactgcgcaggtatattgacaggctgggatatgacacgaattttaccatatatgatgctgacgaccagaaggctctgatgaaggacatctgcaagcgtcttgagatagacaccaagatgtataaggaaaagatgtttttaaatgtcatttcatctgcaaaggatgagatgattgatccgatagagtttgaaaaccgcttcacaggtgacttcgtgaagcgcaagcaggcacttgtatacaaggagtatcagaatgccctaaagcagaataatgcactcgattttgatgatttgcttgtgaagacagtagagctttttaagctggataaagaggtgctggattactatcaggagcgcttcagatatatcatggtagatgagtatcaggacacaaacacagtgcagtttgagcttatcaggcttcttgctatgaagtataagaatctgtgtgtggtgggtgatgatgatcagtccatttacaagttcagaggtgccaatatctacaatatcttgaactttgagaagcattttgaagatgcaaaggtcataaagcttgagcagaattacaggtctacccagaatatcctagatgctgccaacagcgtcatttccaacaacgtgggcagaaaggacaagcgcctttggactgacaacggagccggagacaggattacctttgaacagcttgagagtggcttcgaggaagcggattatgtggcgcgttcgatagcgagactcgtgagaaatggtgaggcacgctataaggactgtgctgtgctttaccgaaccaacgcacagtcgcgtcttttcgaggagaaatttattgctgccaacatcccatacaagatagtcggcggcgtgaatttctatgccagaaaagagataaaggatatccttgcatatttaaagactattgacaatggccatgatgaccttgcggtaaagcgaataataaatgtgccaaagcgcggcatcggagctacgagcatcaataaggtgacagactatgctcttgagaagggtatagatttctatacggcactgcgctacgtcgatgaggtgccgggcatggcgaggtcagcaggcaagataaagccttttgtgatgtttatacagtcacttcgtgcgagagccgagatggattcggtttcgcagcttatacaggcaataatcgatgagaccggctatgtcgatgagctgaaggcagagggcacggatgaagcagagcagcgtattgagaatattgatgagcttataaacaaggctgttgattacgagcagggggaggagaatcctactctcagtggctttttggaggaggtagcgcttgtagccgatatagacggtcttgacgaaaacagcgactatgtggttcttatgactctgcacagtgctaagggacttgagtttccgaatgtgtatctggcgggcatggaggatggtcttttcccaagctatatgtcaatcacgagtgatgatgcgacaagcgagatagaggaggaaaggcgtcttgcttatgttggcatcacgagagccaaggagcatcttaccatcacatctgcgcgtatgcgcatggtgcgtggagagacacagttcaacaaggtatcgcgatttgtgaaggagattccgcgtgagcttatggcaggcgaggtttatgagccaaagcaccgtgatgatgaccttgaaagaaattcgcagagcacgtacagaaaggctaaggaggccttcaaaaagacacctacatacggcacagagtatgcaaccacctttaatacacagcgtacaaggacacctgtctatacacctgtgagcaaccagaagtcttttgccagtgccaataccaccggcggcctttcatataaggtaggagacagagtatcgcacatcaagtttggtgcgggagaggtcatggcaattgtagaaggcggcagggattatgaggtcactgtggactttgacaaggcaggtaccaaaaagatgtttgcttcatttgccaaattgaaaaaaattgactaaaattattgtaatttttataggaaaattggatataatatgctataatggatttaacaaatagcatttgacaattacttttggaaaaggagcggattgaattatgagtaaagttgaagaattattaaaggacaacaagcttgcagagaagctcagcatggcaaagcttaatgaccttctcaaaaaagaagaggaagacaagaagccttccaaggctgttatcatatttgccatcattggtgtattagttgcagttgcagcagcggcatatggtatctacagatttttcacaccggattatttagatgatttcgatgatgagtatgatgatgaattcgatgatgatttcttcgaggatgaagacgatgatgatgctgaagaggaaaaagaggcaccaaagactaaagaagagaaataatcgtttttagataatgggggctacatatgtagtcctcatttttctttatgtgtgaagcaaggcatttgcagtcaggcatacaaaggaataataaagtataaagagagataagaattacatgaaaaaaggatttagaggaacaggaaccgtagaaagagtagacttcccaaacaagggaatagccgttacagatgacggcgaaagagtaattgtgaaaaatacaattccgggacagaaggtggaatttgttgtaaataaagtaaagcatcaaagagcagagggcagactcatggaggtaattgagaaatcgcctctggagacagaagagccatgtcctcactttggaatgtgcgggggctgtacatatcagacagtgccttacgaaaagcagcttgatatgaagcttacccaggtgaaaaagctcatttcggatgccatcggcactgaggaagagtcaggatatgagtttatagggatacatggaagtcctaaaaagagcgaatacagaaacaagatggaattttccttcggtgatgagtataaggatggccctcttgcgcttggcatgcacaaaagaggaagcttttatgaccttgtgacagtatcagactgtcagatagtggatgaggatttcaggacaatattaaaggcaacgcttgattatttttcaaaaaacaatataccatatttccacagagcaacgcacaagggctacctgcggcatctgcttgtcagaaaggcaacaaaaaccggtgaaatcatagtcgaccttgtcactagcacacagacagagggcttcaacgaggaggagctgctcgcaggctttagatatgcgcttttgaccaggcaatatgacggcagattcaagggcgttttacacacaaaaaatgacagcgtggcagatgtggtcaaaaacgagggcacagaggtgctctacggagattcatatttctacgaggagctcttaggtctgaaattcaaaatcacaccattctcatttttccagaccaactcactcggagcggaggtactatatgagacagcgagagagtttatcctgggagatgacaaggattcgctaaacggtaaaacagtctacgacctctacagcggaaccggcaccatcgcgcagcttatggcaccggtgtgtaaggaagtagtaggtgtcgaaatagttgaggaggcagtttgcgcagcaaaggaaaatgcagctcttaatggtcttgataactgtaaatttatcgcaggtgacgtcctcaaggtgcttgatgagatagaggaaaaaccggattatataattcttgatccaccacgagacggtatccatccgaaggctatcgggaaaatcatagagtatggtgttgagaatatggtttatatttcatgtaaaccaacaagcctggcaagggatttgcagatatttatggctagagggtatagagtggagaatatatgctgcgtggatatgtttccgaatacttatcatgtggagacagtggtgggactacaaaggaaagatacctagaaatccttgaatttacgcactttgtagagtttttcagtttcaacaaaatcggtgaaaatcacaaggaaaagatacttgtgcagagagtaaccgtaattgttgccttagacctcggtacggggaacacaaaaaatcctgaatatgaaaatgaatagagagctatcaaataattgatagattatagggatacttgttaaaagcgggtgtccctattttttatagggcattccagaaatggggtgtcttttttattaaaatttaggaggaaaacagaaatgacaaacacagcgttaagagcagagaatagcaattctcgcacaattactttcaagagcaaggaacacgaaaaattttatatggaatatctgaaaaaatgcagatatcaggatgtttatcatcaggctctggtttattgcctgggtatcgacagagacacaagagaaaatgtgaataaaatctataattttaaaactggatgtgtaaaaacggaatccctgcaggaaggttggcagaccagtggaagtttacggatcgtccgcatggcatttaatctttactgcaatggaaccccaagtgtcggagattatgaagtagaggaagatcagttaaaagagtgtcagtattataccgtagaagatctgttttgctgcggatatgcccggtatttttgggaagccattaaaatccgttacccagagtattgtttttacaaagactgggaggatatgtatgctgaaaattagattacagggtactttaaaggatatccaatggttccgtcgtattttggaaaagcataaagaattggatgttctggaagtatcggatgcttatgcgaacaaaggaacaagcaaatattttcgtgtttatgttgaagtagaagaaaaagagtaaatcggaggaaagtatatgtgtaaagtaattgctattgcaaatcagaaaggcggagtagccaaaacaacgacaacaatcaatctgggagccggactggtgaagtcagggaaaaaagtagtcctggtagatgctgatccacaggggcacttgacaatgggattaggattccctaaaaatctcaaggtaacattaaaaagcatgatggagaacattatcatgggactggaatttgatccgaaagaagcaattctgcaccatgaagaaggtgttgacctaattccgtccaataaattgcttgccggaatggatatgtctttatttacagtagaggacagagaaaaggtgctgaaagagtatctggaactgctgaaggatgagtatgattatattctgattgactgtatgccatccctgggaatgctgacgctcaatgctttgagtgcagcggacagtgttctgattccagtgcagccacaatattatgcggcagatggactcatggaattactgaaagtagttaagggaatccatcagaggttcaatccggatttacagatagaaggtattttattcacaatggataattgccgttacaataatgcaaagagaaacaaacaggcaatcaaaactacatacggaagtgacattaggatttttgagcagacgattccgagaacagaaagccttgcagaaacagcatcggagggtgtaagtatctttgcctatgatggaaaaagcaagggggcagacagctatctggaactggttcaggaggtgttgaaacatgcgtagaccgaaaaaagacattcagcttacctcttatgatgaattactgggattagaggaaacaccggaaaagagtatgaaccaggttgtggaaatagatctggcaaagctctatccctttaaaaatcatccgttccatgtaaatgatgatgaaaaaatggcagaaaccgtagagagcattaaaacatacggtgttttgactcctgcgctggtaagacctcgaccagatggcggatatgagatgatttccgggcatagaagaaaaagaggctgtgaactgtgtggaaagactacattgccagctcttgtccgaaattatacggatgatgaagcggtcattattatggtcgattccaacattcagcgtgaaaatctactgccaagtgagaaagctcatgcctataagatgaaatatgatgcaatgaagcatcagggaagtaaaggtgagaaatatacagcagatatggttggggaagctgccggggacagtgggagaaccgtacagaggtatatacgtctggcggcattatcagatgctttgctggaatatgtggacaataataaaattcctatgattgtgggagaaaagctgtcttatctgaagccagaggaacaggggtggcttctggaagtgattaccaacagtagcatttttccgacaaaacaacaggcagaacagttaaaagaatgcagtgcaaatggaaaattaaaccagagttatatctatgctgttttattaaaaaaggaaagcagtaagatcaatgtgacgattccggcaaagaaaattggaaattattttccggagacatattctaaagaacagatagaagaagtcatttttatgcttttggataaatggaaagaaaacaaagaaggagtagcagatgcagaagatacagtttgattattttacggggatggaagcggaacaatacagcttttatcgtgtccctaaagtgctgtttaccgaaccatgctttaaaactctttcttgtgaagcaaaggtattatacggtctgatgctagaccgtatgagcctgagcattaagaacagatggctggattcagaggacagagtatacattattttcactgtggaagaaattgcagagttgatgaactgcggaactcaaaaggcagtgaaactggtaaaagagctggacagcagtaatgggattggattgatagagaagaaacgtctgggactgggaaaaccgaatgttatttatgtgaaaaattttatgatcagagaggttccagatcaaaagccgacaggtaattgtgcagatctgcaatctgagcaggaagatcataaaaaaattgcagatttgcaatcgaaacagaaaagacatgaggaatgtgcagatttgcaacaagaagcagaaaacaaggggaaaacaggcatttctctgaattgtgaaaatcatcattcaggagtagtgaaaaccacaattcaggattatggggaatcacaattccagaatagtgaaaatcacaattcaagaatggtggaaaccacaaatccagaatttccagaatcacaattccaaaatagtgaaaatcatcattccagaatagtggaaatcacaaatccagaatacccgaaatcacaatctaataatactgatattaacaagactgatattagtgaaactgagataaatcaatcttatccaatcatatcaggtaatccccaaaagaaaaaagatgtgatggagaagatgagagcatattgtgaggtgattcatgaaaacatagattatcaatatcatgccaaggaagatgtagatgaactggtggagttgatgatcgaagttatgatgatgccggaggacagtatgattcgcattgcgggagtagaaaaaccagttgctttggtaaaaaacaggtttatgaaattgaactattcgcatatcgaatatgtgctgttctgtctgaatcggaatacgaccaagattgggaatattaaagcgtatcttctgaccgccctgtataatgccccggcaacgataaacagttattatcaggcagaagttaatcacgatatgtatggaggataaaggaacatgaagaagatgattaaaaaagtgatagcaccagtgctggtgattacagtattgtttgcagtattaagaacgttttgtatccaggatgggaagtgcaattatttcttgctgttacttctgatggggataccgtttggaatcggaaaaatgtgtgtctggatggttccaagagattttgatcttggaggaacactggcagtatggaccatgaattttctgatcggaggattgataggaagtgtcgttcttctggcaatgattggacaggcaatcatttatcttagtgttttcctgctcacagttattacaggaatacataaaataccgagaataaaatgaaatagatcttttgaaaagcagctaagacaaaattagctgctttttttctggaaactttgcgacaaaatgtcgtaaagtcgggataaattgcaggaaaggagacaccgtattgagcaatcgtgcaatttccacagaacttattgaattgggagaacggatcagaaaacgcaggcaggaaatgaagttgtcacaggaatcttttgcggaaaaagcaggtatcagtgtcaatacggtcagcaggatagaaggagggcaaacggcaatgtctgttgagattttcaggaagatgattgagatcctggaaacagatgccaatatcctgatgggaaaagagggggacgatgcagaaaaaagaaagcagtttgaggaagtattttatcgtattcagaagatggaatggaaagagcagaaaattattatgcagacaatagattcgctgatagacagttttaatgagtacaggtgaaatttcaccatatatggggtgtaaaacaaaaaaactccccatatatgctaaggataatagttttttgtgctgttaaaatagcaaacagagagaaagagacagaaacaaggaagggagacaggattgatgaccagacaagaaaatttaatctatcggaagcagtgtccctatgatgcaatgggagactattctgttttgatggaaaatgaaaagaacataaaaacggaaagaaatgcaaagaagtctgaccgggacatcagacggaaaataaaatagaggatgctgtaaattagcagaaagggcagtaaggaagtttcaggctctcgttaaaaaaaacgggtgtgccggaagctgttttttactgcccttttgccagtaaagcagtaataatcctatcctttctgctgatgggctcctgttgccagtaggcagaaaggtggtaattatgctgacattgcaggaattgaaacaggttgtaggtaacaggaaagaaaaaagaaaggttccgtccgccaggtatttgagagaaaacgatgtggcagttgtaaagcagagactgatagatggtgcggaaattattgcgtatcagacaggatatgttttctattgcgtgggtgattatggaacggtttttcctttatttacctgtcgagattatgtatatgaagcaggaagaaaaataacagttgttaaggaagatttttttgataatcagccctggtatgtgcggttgatattagaaggtgaagatcggctgtgcaggaacagggaggtacgagaacataataattgcatttcatacagccatatttcagaaggctggtgtgaattggtggataaaaggcagaatgtacttgaaaaactgatcatagaagaagctattggagaattcatggatctgctgactgaccggcagagacaggtgatccatcaaatttattttcagcagcgtacacaaagagaagtgtcacgggtgtttggaattacagaaccggcagtatcaaaatgtatttcacaggcaaagcagaaaatgagaagaaatgcaggcagactgatcggagtgcttcagaagggagaataaaagatgcgtggtaaaaaaccaaaggaaagacaacggtatgtgctgcgtgtaaatgaaactctcatagaagttaccagagacgtatatctggcatggtaccagtcaagaagaaaagaaagataccagcttgaaaaaatgcagaaaaatggtgtgtgcggaatagaaaaagtaggggaaacgagttacaacagttatttgcatatattatcaccagaagaaatagtcatcagggtgtcagaaatacaagagctgcaggaagcactgaaatatttgtctgaagaagaaatggaattgataagattattattttttgaagagtacacagttaaaaaaacagcacagtatttcgggtgttgtacaaagacaatcagaaacaggaaaaacaaagtattgcagaaactaaaagacaggctggaaactttgtaagtttttgctgtttcaaaaaaattttataaaaaaatttcaaacaggttaatttttgccctttcacacatgcggttagtggaggggcaaatgtctattttaattcaaaacaataaattcccccctaaaagtgaaccttgacaatttcatatcagcagcaagaggatacctgaatttcccagctacgcatctggcggcgggcattcggtgacaacgtgaagggcaatggatgagaggcacccttggcaggaatgattacgaattacctcttgcggcttaaatagctcaatcctgtttttatttaaaagtcaatccaagacataagggaggtggttcctatgattgattcatgcaggtgtaagcctgaacgaaagtggagtaaattatcgaagaaagagaggactcagtcaaaatgaaaatgcgatttaaaagattcttgtcaggatttatggcagttgcaactttggcgtctgttatcgttcaaccagtcacggtttctgcttctgaattagaaccagagccaacttcatttgaacagcaatatccggaactgcaggatgtgcaggatactcttgataaagatgaaattgtggaagcaaaggatattgagattccctatggagaagaatttgaggtggaagtcgatctgtccggtatagagggcgtgaatgaaaaaaaggtgaaagttttattccatgaagcaaagagtgaagccggtacagattttgacgcacatacaccggatacctacaaagctgtctatgcagtagagccagtcagcggtcacccagcttacagagtaagcagaaacattacggtaaaagagccagaaacagaagaacagacaaagagttcttctgaaaatacagttggtgaaggaaatgccggtgaaacagaagattccggtaatgcggaggaagatgctgattcggacagggcaaaagagattgtgactgatcttacagatggacaggaagtaacaacagatgaagaatctggtctgactgtttcagaagtaatggatcaggcagaaaatgaaggaattgacttgtatgagatggagccgggtgaaacagtgacatttatggcggcagcaggaaatgcaagaagttcacaacaggtttcagtgacaagaggtgccgaataccgatatgcggattatggttatggaacttatctgacgtatcagtataccgtaaaattcggtaatgtgtccgccacagcttattgtgtacagccgtccaaaccgggacctggtacgggaacatatacaatcaataaggttggggatggcaaagcactggctaaagtatgctactatggcacaaaagcctctggcgatgatggattttttacagaagaaaatggctatggaaacctgagtgcaggagccagatttattctggtacatcttgctgcgtcatatgcgaatggcagttccgatgctttttctggtgcaaacactactgcacagaatcttgcgaaaaaactttataattattgtatttctcagccagatattccggatgtggcaatgtctttttcagatgcagatgtgacagcttatgtagatggcaacagccagagaacaaaggaaatcacttttaaagcagatgaactgcagagtatcacaatgaaactcccaagtggtgtgaaactccataacgtgacaaccggaaagacaagcaaagctggcgaagcagtggaaatcagtggtggaaccaagttttacttatctgcacctcttacacaggtacaggatgttgcaggaaactggtctgcaacgatgaaaggcagtgtaacaaaagattattctgcgtataagatcagtaccggatctggttcacaggacctggccctggtatttggtgaaggtgttgatgatgagaaatatgtggacttcaaagtaacctgggtgcagcacgcaagtgtgaaggtgattaaaaaagatgcaaaagcagacgcaaagctgtctggtgcagtgtttggtttatacagtgatgcaaactgtacaaagctgatcacaaagttaccggcaaccgatgcgaacggggaatcgtccgtacagatcattaagacacaggacactgtatatctgaaagagattacagctccgacaggataccgtatcaatgcaactgcctacaatgtaaaactggaagtcagcaaaacaacgactgtgactgttccggatgaagaacagatgggacagctgactgtttataaagaaggtcaggttctgacaggtgcagatgtcaccgagaatggaacaacatttaagtatgagaaacgcagacagaaaggtgcgatttatgatgtgtatgccggagcagatattaaaactgcttatggtgccaaggtttacagcaagggtgatctggtcaaagagaatctgacaacagactcgaatggggcagtcattctgaaaaacctgcatcttggtacatatatcatcaaagaaaaacaggctccgaccggattttataatgccggggaagaaaagtcagtcactctttcttatgcaggacagaatgtagatgttgttttttctgagacaacttttacgaatgacagacagaaagcagaagtagttgtgacaaagcaggataaggatacagaaaatcctctggatggaggaatttttggactttatgcagccagtgacattaaaaatgcagatgggacggttgtcgtaaagaaaggcactctgattgagaaagtgacaactggaaatgatggaacagcgaaatttaccgcagacctgccgctgggattttcttatgatgtaaaagaagtacaggctccggaaggctatctgagaaatgcagatgatgtatatacgtttgcgttttcttatacaaacgataaggaagcaaaactgacatttaagcataccttcaaaaacgagcgtgtgacagcaaagatttctttacagaagcaggacaaagaaacaaagaaggcagttccacagggagatgctactttagaaaaggcagtttatggtctgtatgcccgtgaggatattgttcatccggatggagcaactggcgtgatctacaaagcaggagagcaggttgccactcttacaacagataagaatggacaggcttccgtagatggattataccttggtaattactatgtaaaagagattactcctccaacgggttacctggcagatgaagaagaacatgatttggtttgcaattacgagggtgatcttgtagcggaagtgaagcgtgactgtctgtctctggaacaggtgatgaagcagccatttgagattatcaaggcagcgaacaacggaaagacagatgccgatttactgaaaggtgcaggatttaccgcttatctggtatcatccctgacagtaaaagaagatggcagctatgactttgattctgccaagccggtagtgatcggagaaaatggtgcaacagagatctttacggatgagaaagggtatgcccgcagtattgcgattccttatggaacctacattgtccgtgaaacaaccacaccacataattatactccagtcaatgatttcatcgtacagattacggaaaatcatccgactacaccgcaggtatggagagtgctgcttgacaaagaatttgaagcgaagctgaagatcatcaaacaggacgatgagacaaagaaagcagtccttcagaagaatacagagtttaagatttttaacctggatacagaaaagtatgtggaacaggtaacaacgtatccgacgacagtaaaacataaatcttattttacagatgagcagggatacttaattcttccacagaatctgaagatcggacattaccgtattgaggaagtgaacgcaccttatggatatacactcaatgagaattactatgaagtggacgtagattccaatacagcatatcagatggacggaacttccggcgatgtgatcatcgagattgcatacgagaaccatccggttaagggagaactgaacatcgtaaaacagggtgaggtcttaaatagttacaaagatgattttacttatcagaaggaaacactggagggagcagtctttgaggtatatgctgccgaagatatttatacagcagacttccagaaagatgataacggaaatcgtatcctggagtatgcttccggggaactggtaggaactgttaccacggataaggatggaaaggcacagatcaccgaccttccacttggaacctataagattgttgaaaaaactgcaccagagggatttgtgttaaatgaagaagtacagacagtaacatttgaatacaaagaccagaaaacaccagtcatcgagcagacagcaacctttgagaatgaccgccagaaagtggaagtgttcgtagtaaaacaggatgcagagacagaaacggttgtggcaggtgcagagtttggtatctatgcaaaagaagatattctggcacatcaagaagtgattgtgaaggcagataccttacttggaaaagcagtcagtggagaagatggaaaggcagtatttgacgttgaccttccatttagtacttactatatcaaagaacttgcagctccggcagggtatgtctcttcttttgagactttggaagtgactgccaaatatcagggacaggatgtgaaagtagtagagctggaatctgtatttaagaaccagccgacaaaagtaacctttacgaagtccgatattacgacaggcgtggagctttccggggcgacgcttacggtgcttgataaggatggaaatgtggtagatacatggaagtctgtaaagggtgaggaacatctgattgaaagactcacagccggggagacgtatacccttcgtgaagaaatggctccttatggctatctgatggcggaagaagtttcttttactgtggatgatactgccgagatccagaaggtagagatgaaagatgcagtgccaactggaacacttatcattaataaaaaaggtgagttcctgaagaaagtatctgcactggattccattggcggatggatgaagcatctgtttgaatatctttccggttccctgaaggatgttacttttgaggtttatgccttagaagatataaaagcagcggatggtgagagtgaagattactacaagaaagatgcactggtagcaacgatcacgacggatgaaacaggcatggcaaaactgacagaccttcctcttggcaaatactatgtcaaagagaaagagacagcaagtggatatgtcctggatggagaaacccgtgaagtggatctgacttatcgtgaccagaataccgcagttgttacttattccgctgactggcagaacaaacgccagagggcagaagtaaacgtgttaaagaaagaaaaagattccgaccgtgtgctggaaggggctgtatttgccctgtgcaataaagaagatattgtcaatgcaaaaggcgatgtgattctgaaagcggatacggttattgaggagcaggctacggataaggaaggaaaattgacctttacggcagatctgccacttggctatacctactatgtgaaagaaacttccccggcaccaggatttgcgacaatagatcaggtacaggaatttacttttgaatatggtggggcagataaggaaacactgtcttatgcgtttacttttgaagatgagccgacaaccgtagagtttaccaaaacatctctgacagacggaaaggagattgaaggagcaaaactgaaagtcacagatgagagtggaaaaactgtggatgaatggacttccggtaaagaaccacatatcatcaaagaactgaccgctggcaagaagtataccatgacagaaacacttcctgcggacggttatgtgacagcagagagcatcacgtttacggtggaagataccagtgaagtacagaaagtggaaatgaaggatgatgtgacaaaagtgcagatttctaagaccgatatttctggtaaggagctgccaggagcgaaactgacgatccttgataaagatggaaagaccgtggaaagctggacatctgaagaaaagccacactacattgagatgcttccaatcggggaatataccctccgtgaagaaactgcaccggacggttatctggttgcagaggatgtaaagtttacggtcaaagatactggagaaatccagaaggttgtgatgaaggatgaggcgaaaccggaggaaactccaacagagacaccgacggaaacaccagaaaccacaccaacatcggagacgaaaaccacagaagaaacaaagaaatcgactgcaccaaagacaggagataatacgccgattctgttctggattctgcttgcaggggctggaatggctggtcttggtggcacagtgattcttcgcaaaaagaaaaaataagagatcataggatttcttggtaatggatgagggcatttatggacacaggattcatagatgccctcttataaaatttcaagagaagtgaagggagaaaagaagatgacaaaaacagtattgatcgttgctgcagctgcagtatttctggtatatggatttgtcctttggtgctgtatcaaagtgggagcggaatcagaaaaagaatatatgaaactggcagaaaagagaggaaaggagcagcaatgtgataaatgaggataagacagcagtgagagaagaaagggcgtggtgtgattgcaggatgaagtgaatgagaaaacagtctcactttgtatccgctgtggcaaggtcactgccaatctgctgaaagctgccatggtaaaggctcttgcaaagatggagcaggagaaaaaacagcagggacagaaaacaaaccagaaacagccccagaaggaaaaggaggataagacctacaagggaaaacagagccttgataagctgatgaagcagaatgtacagctgtccaacattgagatcacagatggaaacatcaagtcttttgaacgggtagcaaaaaagtacagcattgatttcagcctgaaaaaagatgtgactgcggacccgccaagatactatgtgttctttaaggcaagggatgccgatgtgatgactgccgcttttaaggaatacacgggcaagtctctgaataaggacaaaaaaccatccgtgaggaagaagttacagcaggcgatcaccaaatcgcttgcaaagcacagagagctggagaaaacaaaaggaaaggagaaggagccatcattatgagtagattacagaagttgcttggtgtaggaaaaggatacctggagagattaccgccggtggatgtacataagctgcttcggattgttctgatgaatcttccgtatatcgtgatcttttatgttggaaataagctggcatggttataccaatactgtgtaggtgattccatgatagaaagactgatggtgctgatcttaaatttccagatggcatttagcaggattctcccaagtatgcataaaaatgaattgctggttgggattactggagccgtggcagtgaagctcatggtctacatgaaaggaaaaaatgccaaaaagtttcggcagggagtggagtatggttcggcaaggtgggggacggcaaaagacattgcaccctttatcgacccggtatttgagaataatatcctgctgaccatgacggaacggctgaccatgaatggcagaccaaagaatccgaaatttgcgaggaacaagaacgtgatcgtgattggcggatctggctcaggaaagacacgtttttatgtaaaacccaatttgatgcagatgggaaaatacatcagttatgtggtcacggacccgaaagggacgatcatcattgagtgcggaaagatgctggtacggcatggatataaagtaaaagtattgaatacgatcaatttttccaagagtatgcactataaccgtgcgacttgttcgctgctgaaaaggtggcgcacagcgctgtttcaatcagttctgtgaactgataattcgagaggtggaatgaaggagtaacgccctgaaacgcctcccctgatactccggcatgcagaggccaaactctgtgtgaagcccggtaaagccggcagagagatgccgtaacaggttaagctgacgaaagctgtccagaggtggacggtgcatcctatatgccgggggtctataagatacccatggtgagaatgacagagatgtctgacgaaactcccgaatgtaaaggtctaaaagtgccacgctcagaaatgggcgtgtgggttaaagcccaggcagtacggtttagtagaaatggttgttacgaaacgccgtggcacgttacaggcgtgtccaagctgtcaggcccagagggaacacctaaaggtatgtatgtacagataggattatcggaacaaggaaaggcaggaagtctactggataatccggcgaaggataataagcggatgaattcctgctgaaaagcagtggtcgaaccgatgatatcgtctgcgaaaaagaggacggttaggaatggccacaagtcaggcaaaacgtcagcagtacacaaccactattcatgcagtcgagtaagaaaaagaaattgtcgctcggtttcatagaaatggggtgatgtacatggcacaaaaagctaagaagaaaagcaagctacgccatgcggaatactatgacatgcagaaaacctttgacagtctgtatgcagacagcaaaagcggtgaagtctttgggcatctgatggatatcatcagcgcccccaacaacatcaagctggcatttagaaatatcaaaggcaatgatggcagtcataccgcaggcacggatgggcggacaatagaatcattggcagtcatgtcagaggataagtttgtaaagctcatccagaaacagttcaggaggtatgaaccaaaagcagtaaaaagagtagaaataccaaagccaaacggaaagatgaggcctctgggaataccgtgtattattgaccgaatagtacagcaatgtattttgcaggtcatggagccaatctgtgaagcaaagttctatgagcactcttatgggttcagaccgtgtcggagcgcagaaaatgcgatttcctatgcgtatggactcgcccaaaggaacaagcttcactatgtagtcgatgtggatgttaaaggattcttcgataacgtcgaccacagaaagctgctgaaacagatctggactttaggtatacgggacaccaagttgattcagatcatcaaggccatgctgaaagcgccaatcgaaatgcctgatggggaaaacgtcctcccatccaagggaacgccgcaaggtggtatcctttcaccattgctggcaaacattgtcctcaatgaactggactggtggattgcctctcagtgggatgaaatggtgaggcacatgaaacatccgtgtaaagtgacctactatcccaacggcgcagagaaaaagtgcaacagctatacagccttgaagaaaagcaacctcaaggagatgcggattgtccgttatgcggatgatttcaagatattttgcagaaccaaagaggatgcagagaaaacctattatgcagtcaaagactggctatggaaacggctaaaactggaagtgtctgatgaaaagtcaaaagtgactaatctcaggaaacgtgacagtgagtttctgggttttcgcataaaactgcggcgcaaaagtaactcatgggtgataacttcaaatgtctgcgataaagccatacacagaatcggcaaggaaatggctgacagtgtcaaggcaatacaaagcagtaagacggctgaagaaataagcctgaatgtgggggactataatgccaaggttatcggagtgcaggactattactgcattgcgacaagggtcaacttgaatttcagcgatatcgcccgtccaatcaatggacagcttcttcatcgtattgacggaatcaagaagcagggcgagatcaaaaacagatatctgaggaaacgatacggaaaatcgaagcaaatgcgatggattggagaaacgccactggttccattagcttacgtgcaattcaagattccaatgcggaaaagccgaaaaatcaatccgtatacgcccgaaggtagagcagagatacacgataatctcaggattgacgtaaattcaatgctctggctgatgaggcatccgataccgaccgaatcagtgagatacaacgacaaccgggtctccctctatgcagggcaagacggtaaatgtgcaatcaccgggaagaaactggatgttcaaacctgtatctgttacaggaaaacaaacaattgtaagaagggcaatgacagctaccagaacctgttgcttctttctttgcagggattggcaatagtcagctcggaagacatgatgtctgtagcggcgttggtgaaggaatactctctgaatgccaaagttattaccaaagtgaacaaactgcgtgctaccgcaggactgccgctactggcggcaaagtagcaaacttagccaatgtgaaagagtgattgtgtatcactgctgaaactatgcttgatggaacgccggatgcggtgaaagtcgcatgtccggtgtgaagtgggggaaaacccggagataatttcaaagggttacctatcactatccttccactatatccattcagaaaaggatattttgaaactggtaaatacgatcatggtgaacacgaaaggagaaggcgagaagtccagtgaggatttctggacgaaagcagagagacttctgtactgtgccctgatcggctatatctggtatgaagcaccagaagaagaacagaactttgcgaccctgcttgagtttatcaacgcttcggaaacaagggaagatgatgagacatttaaaaatgcagtagatatgctgtttgaggaactggaaaaggaagaaccggagcattttgcagtacgtcagtataagaaatataagctggcggcaggtgttgtatgctctaaaagacttcttaatcaagcggttgggaagtctcttagaacacataacctaaaaccgaagaaaggagcgcaagttatgagaaaaaacgagaaaatcacagctctgtacgaacgactgagccgtgatgactttggcaaagatgatgaccaacagcgtgagagcaactccatatccaatcaaaaggcaatgttggaggagttcgccgcacggcagggctttacaaacattgtccatttcacggacgatggcattagcggcacctgctttgaccgtcccggatttttggcaatgatgaaagaagtggaagccgggaatgtggagtatctgtgtatcaaggacatgagccgcatgggtcgtgactatctgaaagtaggtcagattatggaaatcctgcgtcagcgtggcgttcgccttatcgccatcaatgacggcgtggacagtgccagaggtgacgatgattttacccctttccgcaacattatgaacgagtattacgccagagacaccagccgtaaaatccgttccactttccagtccaaaggcaagtccggcaagcacctcacaggcacggtcatttacggctatctctggaacgaagccagagaccaatggttggttgaccccgaagccgctgatgtggtcaagcgcatctttgccatgacgattgacggctacggtccgtatcaggtcgccagcaagctgaaagaagaaaaaatcctcattccgtccgcttaccttgcccagcacggcgagggcgtgaacaagaataagactttcaaagatgtgtacggctggggttcttccaccatctgcaaccttcttgaaaagcgtgaatatctgggacacaccgtcaatttcaagacccgaaagcacttcaaggacaagaaaagccattatgtcccggaggacgaatggacgatttttgagaatacccatgagcctatcattgaccagcagacctttgaccttgtgcagaaaatccgtgggaatgtcagacgctacccggacggctggggcgaagcagctcccctcacaggcttgctttattgtgccgattgcggcggcaagatgtatgtccaccgcaccaataacggcaagcgcatttctcaatacacctgctcacagtacaccaaagttccttgcggaacgctctgcaagacccagcaccgtatcaatgaagatgtggtactgtcccttgtctctgaaatgctgaaagccattgccgagtatgcgaagcatgacagagccgagtttgtccgtgtggtgcaggaagcgcagtccagccagcagacggcagaggtcaggaagcagcggacacgccttgccacagcaaagcagagagtttccgagttggaagtcctgctctgcaaaatctatgaggacaacattttaggcaagctgtccgacagcagatacgccactctggacgctcaatacgaaaaggaacagtccgagcttaccgctgaaatctctgttctggaaaaggctatcaagagctacgagaagcacgaaaaggacgctgaccgttttatcgctctgattgacaagtatgagaacttcgacaagctgacgattgccatgctcaatgagtttattgagaaaatccttgtgcatgagcgtgaccgcaagggcagtattcagaccacacaggaggtcgagatttacttcaatttcgtgggtcgtttcgttccccctgcgtttggcgaagtggagcttaccccggaggaattagaggaaatccgcaagcgtgaggaacgcaaggacaggcttcatcagaactacttgaagcggaaagccagcggagcgcagaagcgatacgaggacaaaatcaagaagcggaaaaaggcagaaattgaagctaagaaagccgccattcgtgcggaggacattgcaaagggcgtgttcgtccctgtcagcagtttaccgcagagagagccgatgaaaggagtacaaacagcatgaatatcgcttacacacagaacggagattatcttatcccgaacatcgttatccgcaagaccaagcccctcggacactacggcagacttcgcaaggcgtatctgaaaatgcaccgtccgatactgttcaatgagctggtactatccgacaagctctttgagcattgcgccgagattgacgaagcggcacgaaaccgcatggagctgatcgtgcggtcactggcagagcaaaacggcgtgaccgagcaactgaaagctgaaaaccaaatggaatgggtgcggcagatgaacgcttgcaaggcgcaggcagaggaagttgtgaaagcagagttgatttataattgagcgaggaagtccgggcagaaaactgttcggacttttctcatatagtccaaagttgcggtagaattgttcacaagttttatggtataatttgaatacgaaattgagcaacaaatcggaagttcaatgtgaggaaaattagatgaagaaaaagtcttattggttaagtattagtgtgttcgtattgatactgatatggacggtttattattatgcaatgcagtacacaggaggatttgcagacttaaaggactctattgtttgtgggattgcaggtttgatatgtatcgtatttatcgtgaaaagaactattgactttttgaaaaacaaaaaatcgtaaaatttcagtttgtcgcactgataaaacccctttaggaactaaagggcgcacttctatactctctgtcgagagtagtgcgtcctgcggagcttcattctccgtcagcagaagaaaactgcatgaccgagaatgttgcgtcacttcgttccgtcaaggtggctacacccccttgcgccgctaaagcggctatcccctgtggacttgccgtccgcaaacggttttgacaaaccgttcgccgccagcaagtttgaaaatcaagaatcttaatttgataaaggagtgtgattctatgaaaaagaaattacccataatcctcttgggtgttattttggcttgtgtgttggttttcggtttcctttatgcaaacaatgacattggtaaaaccgcaaacagtttagaagcagacattcgccaatctcaaaaaatttcggatgattggattgttgatggaagcatttccgacacaatggctgcatttatttcttacccacaggacaagacagaccacactttttctgtctatgtaaatcgccctggcttgtcttttggatatttcttccgtggtggtggagatatagttgaggttgatgattacattgcagagtttgttgttgagggaaataacgaaagggcatttatctcaatgaatacccaaaatattgttcgacttgaagtagatgatggcaacggcattcaggtgattgatattgatagtggcaagcctttcgccattgtcctgcccctcaatgtaggaaacatctgtttctatgatacgaatggaaatgttgtggaatatcttcgccaacaactttgaccaacttcaatttaccgaactgaacacaacaactgaataccgaaaaactgaccgttgactggtcgcaatctgcgaaaagttgacggtctttttttatccccattttcaaaaaaggaggtcacgaaaaatggcaaaaccgaaaaaccttgaacagctccgagccgaaaaggaacaggtcgagacacagcttgcacaggaacagcacaagctggagcgtctggagaacagaaagaagtatctggagaaaggcgagagacaaaagcgcacccaccgtctttgcaatctgggcggcacgattgagagccttgccccggagttcaaagatctcacacgcaccgaaatgacggagctgatggagtacatcttttctctgcccgaagtccagcgagccgtccgtcacatggcgattacccacatcaaccaagcgagcagaggaaaggagcagaaagccgatggcactatttcatctgagcgtcacgcagactaagcgaagcgcaggacagtccgctattgcttctgccgcctaccgtgccggggagcgattgtatagcgagtattatggcgaatacagcgactacacccgcaagggcggcgtgatatgctccgacattctcctgccgtcccatgcaccgaaagaatacgcagaccgtcagaccctatggaacgccgtggaaaaagccgagcgtggaaagacggcacagcttgcatacagttttgagatttccttgcagaatgagttttcccttgaagaaaacatcgctctggcaaggaaatttttgttggagcagtttgtgagccgtggcatggtggttgacttcgccgtacaccagccagaccgggaggacggcggcataccaaacccgcattttcatgtgctttgccccatccgccccatcgagcagaacggcaaatggggactaaagcaacgccgagtgtatgagctggacgaggacggcaaccgtatccgagacgcagacggaaagtttgtgttcaacgccgttcccactaccgactggggcagtcccgaaacgctggaatactggcggcagacatgggcggagctatgcaatgccaagtttgcggaaaaaggtattgatgttcgtatcgaccaccgcagctatgaacggcaaggcgtggatttacttcccactatccatgagggtgcaaccgtccgggcaatggagaagaaaggcatacgcaccgagaaaggcgagttcaaccgctggatcagagcgaccaatgccgttatccgggacatcaagaagaaaatcactctcctgtttgattggattgccgaagcaaaagcggagcttgccaagccgcaggcacccgaccttgtttctctgctgaacgcctattacacccagcgcagagccggggcatattcgcagaaaggcaaggtcagcaacctaaaggagatgaacgagactttcaattatctccgggcaaacagcatttacactcttgaagatttggaaagccgtgtcagcgaacacagtgctgccacagagagcttgaagaaaacgctggacgaacagaccgcccgaatgaaagcaattaagcggctctatgacagctccgctgctttccagagcttgaagcctgtctatgacggcttgcagaaaatcaagtttgagaagcccagagccaagtacaaggcagagcatgaagcggaactgatacagttctacgccgccagacgaaagctgaccggggagttcccagacggcaaggtggatatgaaaaaactgtccgacgagtatgacgagctggaacaggcgcacgaaaccacctatggcgagtttaaggctgtcagagacgatttacaccgtctttggaaggtcaagtcatgcgtagatactgccgcccgatttaacgagcgtacagaggaacaaaagctccaaaatcgaccccaaacacgacagaaaaaggaggaactatcccgatgaattacacccaagcacagattgaccgggcaaacgccgtcagtctggaagattttctccgcacacagggagagacacttatcaaaagcggacgggaataccgctggaaagaacatgacagcctgaccgtccggggaaacaaatggtttcgccacagccagagcaagggcggctatcccattgattttgtcatggagttttacggaaaatcctttcccgaagctgtccagctcctgaccggcgaaagcggcgagggacagagcgaagccaccacagcaccgcccacagcgttccacttgcccttgcacaacagaacagccgacagagcaattcaatatctttgcgaaagccgaggtctcaacaaaacgcttgttgaggattttcttctttccggggatatttacgaggacgcaaagcggcacaatgttgtgtttgtcggcagagaccgaagcggtacgccgagatacgcccatgtgcgaggaacggcagacccattcagacaggacattgccggggctgacaagtcctatccgttccgctatgagggaaacggcaaccagctctttgtctttgaagcaccgatagacctgttatcgttcatctgcctttatccgcaggactggcaaagccgaagctatcttgcgctgggcggtgtttcgggcaaagcccttgaccgtttcctttctgaacgcaaggacacccgaaaagtgttcctctgccttgacagcgacaccgcaggaagcgaagcctgtacccgactggcacagtccattcccagcgagatcgccgtcattcgccttgtcccggcaaggaaagactggaacgatgttctccgtcagcaaggggacattcccagccgcaaattcatagccgagacaatcacgctgcgagagctgcccaccgcccagcctgttcccatgctccgcatggcagatgtggagctgacgagcgtggattggctatggtttccctatattccctttggaaagctgacgattatacagggcaaccccggcgagggcaagacctactttgccatgcgtcttgcggcggcttgcaccaaccgaaagcccttgcccggtatggagacccttgagcctttcaacattatctaccagaccgcagaggacggtctgggcgataccgtcaagccccgactgatggaagcggaagcagaccttgaaagagtgcttgtcattgacgatagggacacaccgctgacccttgccgatgagcgcatagcaagggcaatccgtgagaacaacgcaaggctggttatcattgacccggtgcaggcgtttctgggcgcagatgtggacatgaaccgggcaaatgaagtccgtcccatcttccgcagtctgggagacattgcacaggctaccgggtgcgctatcgtgctgatcggacacctcaacaaagccgcaggaacgcaaagcacctaccggggattgggctctatcgacattacggcggcagtccgcagtctgctttttatcggcaagctgaaggacagccccacaacgagggtgcttatccatgagaaaagctcccttgcgccgcctggtcagtctcttgccttttctctgggagacgagaaaggttttgaatggataggggcttatgacattaccgctgacgagcttcttgccgggacggacaccgctaagaccgagagcaagaccgcacaggcgcaaatgctcattctggaactgcttgcaaacggaaagcgtatgccgagcgcagagctggaaaaggcagtcaatgagcgtgggatttcctcacgcaccatgagaacggcaaagagccgtatcggggacagacttgtgaccgagaaagacggcacagcatgggtctgctatctccgagactgacaacaggaacacggcaagcgtggcaaagacggcaagggttttatagataccttaatgttgccgccttgccttgttccctcataccgacgccgcccgatgatgaacagtcaccgggcatttttcatttacaggaggattttgaatgaacaataccgcaaccaacaccgccacttgccctactgtcagaaagcagatcggcaagaccacctatatcgtccgtgtccatttcagcgagaccgcaaaagagacaatggaggacaaaatcaagcgtctgctccgtgaggaagtccgcaaaatgtgacttctttttgaatttgatgaaaaagtccttgacttttcgtctctggaaagacagcaaagagtattttgatttcctgtggtgcaaggcttgcaccgttcgacattgcagagcttcgtgagatcatgagctatgatgagatggaactggatatggtaggtgaccagaggacaacactgtttattatcatttccgatacggatgatacctttaactttgttgtggcgatgatgtacagtcagttattcaacctgttatgtgacagggcggacgatgtacaccatggcagattgccatatcatgtcagaatcctctgtgacgagttcgcaaatatcggtcagattccaaagtttgacaagctgatcgccaccattcgtagcagggaaatctctgcatccattatcctccagtcgcagtcccagttaaagacaatctacaaagatgcagctgagacaatcctaggaaactgcgacacgatgttattccttggcggtaaggaaagttcgactctaaaggagatttccgagacgctgggaaaagaaacgattgatttatataacacttcggacacccgtggacagagccgttcttacgggatgaactatcagaaaacaggaaaggaattgatgagccgggacgaacttgcggtcatggatggcagcaaatgtatcttgcagcttcgaggtgtaagaccatttttcagtgacaagttcgatattaccaaacacaaacggtataaggagctgtcagactacgataagaaaaatgagtttgatgtggaagcgtatatgcggcatcggatggaagtgaaactgacgaggacacaggaatttgacctgtatgagttttcggaagagcgtctggcagaagaattaaatacagaaaacaaggaagcagagcatgtgaaagattcggacacatagctctttttctttgcccttttgggaggtgatggatttgagagatcatgaaaggccgcccgtaagggcagagccggaaaagacttcttaaagatagaaaccagagaaatacagagatttgaaaggagacaacgaatatggcgttttttaatcaggcaatcaatattttacagacacttgtggtggcaatcggagccggacttgcagtatggggtgttattaacctgttggaaggatatggaaacgataaccgtgcgacacgttcgtaagtgaaaagcttacgcacaaagtcgaagggctttcaagcctgaaactttggagaactgatattccgatgagtgaaatgagggagtaacgccccgaagcgctcacactgatactccgactggcatcagcgtgcaaccgccaaagtgtcagaagctcggtaaagtcggcagagagtagccgtaaatatggctaactaccatatacgaaagctatccagcggtggatggtgctacctatatgccgggtgtcggttacccatggtcagaatgtacgaaagtactgacgaacttccgaatgtacgagtctaaacgttgatactgtcgaaaggcagtagcccttgtacgggcgtgtccgtggattagtaagaatggttgttatgaacatccatatatcgttacaggcgatatgattatgcatgattggacacaggcttagaggaaggacctaaagataatcaacgataggaatatcggaacgtggaaagctgggaacgtatgaaacaagccgttgcaggtcgttggacgggaaagccgggcaaaaccggtacaaccgtacttaatcccagtgagagtaggggcacagtacctgtgaagcgatgctaaacatcgtggagggatagccccaagtcgaattcaacagaaaaaaaatgaatatacgataaacgcagcttcgagtatgacaaagaaaatccaaaccgaagggagaggatgcctgtgttgacttcgaaacagcaagaacagaaatctaaacagagaaaaatccgcaattctgagtattatgacatgataagtacttttgatggattgtatgcagacagtaagaaagacaagatatttaatcatcttatggaaatcatcgagagtgaagagaatatcaagctggcatacagaacgataaagacgaatacaggaagtgataccgcaggtgtggacaaaaggacaattaatgaccttgctaaattaaacgaggaagaatatgtccgtctcataagaaagcaattcagttgctatcacccacgcccagtaaagcgtgtggagataccaaagcccaatggaaagaccagacctctgggaatttcaactatcgttgaccgagtggtacagcaatgcatcttacaggtcatggagccgatatgcgaggcaaaattcagcgataattcttacggattccgtccgaatagatccgctgaacatgccatcgctcagtgtatgcgattgatacaggtacagcatatgtatcacgtagtagaccttgatattaaaggatttttcgataacatcaatcatactaaactgataaggcagatatgggcattgggaataagagataagaaactgttatgcatcattaaggaaatgctgaaagcatctgttattctgccaaatggagataaaactttccccatcaagggaactccacaaggcggtatcctgtcgccattgcttgcaaacattgttttgaacgagttggattggtggattacttcccaatgggaagaaatgccaacgaaaacagattttacaacaagaagcaataagcagggaacagttatcaaaagccatgcttacagggctttgcgcagaagcagactgaaagaagtgcatgcggtgcgatatgccgatgatttcaaaatcttctgccctacacatgcagaagccgtcagagcgtataaagccacagaaatgtggttaaaagaccgcctgggtcttgatataagcccagacaaatctaaggttgtcaatctaaaaagacagtattctgattttctcggattcaaactgaaagtgcggaaaaagggaaagaaatatgtcgtcaggtcacatatgtgtgacaaggcatacaaaaaggctcatgaaaagctgaccaaggaagtaaaaactttggctcattcgccagatgacacagctcagtttatacagttacagaaatataattctgtagtcgcaggactgcatgaatactactgtatagcaacagaaacaacagcggactttggaaagcttgccttcagtatcaataaacagcttagaaatcggctgaaaggcgatgtgtcccgtaagggttctctgaaaaatggttttatcaaagacaagtatggtaaaagcaggcaattgagatttctgcacgaacgtcccattgttccagtgggagccgttccgcagaaaaatgcccaaaacaaaaggaaaaacatcaataagtacactgtcaagggacgagagctgattcataagaatctaactattagtaccgacgcaatgttatggctgatgcgtaatcctgtcaagggcaggtcaatcgaatatgcagacaacagaatatcactatttgcggctcaatatggaaagtgtgcagttacaggacttcctatggaagtacacgacattcactgtcaccataaaatgccattaagcaaaggtggtacagatgcatacgaaaatctgattttagtctcaaaagccatccatgtgattattcatgcatcgtctgaaatcactatcagagaatatctgaacccactgcaattagatgattccaaacttgcaaagcttaacaaacttcgaactatggcagaaatgcctgtaatcattctttgataaatatgctgttacgaagtgtgtaaatcgtatatgaaaaaccctggctgttgaattcgatggaacgccgtgtgcggtgaaagctgcatgcacggtgtggagcgggggaaaatccggagattatatcaaaggattacctatcgctatcaggtgcaaagtcccagggaatcaagcagctcatggctaattagatgtaataaaagcggagaaaggaaaagcacaatccagacggaaccggcggtgtagtcaagaaatattgtggaaacgcaagatttctgctataatgggtataaaacacttgacgatggaaagaaaggcgggaagcctatgcacattagttatcagccactatggaacacactgaaagagcgtggcatgaggaaagaggatttgcggcttgccgccggtcttaccacaaatatgattgccaacatgggcaagggaaagaatatcagcatggaaacgctggttcgcatttgtgaagccttgaattgtggtattatgaatgtgattaaattagaacaggacaatatctaaagcgatataattttatatttgattcgatttgcacaaaaaattaaattttaatggtgtatattttctattgtacccaatgtaaataagtgctatcataaaataaaacaagtacatttgaaacattttatgatttgagagtgtgcttgcaggttagtagcatattgccaataactgaatacaaaaaatgtaggttctggtcattttagaaaggagcattgtttatgaaaaaatttagtaaaagattgtttacctcgttggtagcgttttgtatgcttttttctgtgagtgcggttcctgcttttgcagcggaaacaacaacggaaataacggatactcaacagccggtagtcattggagaatatgacggatacttaaccgatgttatgatttccgatggtgtcaccaaaagagcagtcgctaatgttcgtattaactcttatgcaacttatgatgaggatgatgggattcaagttcatgtgaagttgtatgtaccgtggtatgaatctccaaaaccggagttcactggtatgactggtacagttaatgtgcttatgaacaaaaaatccaccaatacggcatttgcagaattagccgacggtgaagaaacaatcgaaactgatgtggatactggaagaacaggtaatagcggagataagggaacggtttctgtttctggtgttgctaccgctaataatgccttggcaggcggtggagctttcgctatttcttaccctgtgacacttccctaattaaatgcaaaacagttgtgaattaaggttggtaataggtaaaatgaaacggttattggcaatatgcgtatgtttttttatgtgtgtaggcttatgttcgtgtgattcttcccaaactcggtcggtatcatcatataactggtctttagaatttattactgatttagatggtaatatgttattctcaggttcagtgcatgatgacataccagtattggatttgacattgagttttgaagaaaaaagttttatcttaacagataacactcataaacaagaatggacaggtacatattcgcttgaaaagattgacaattcttcttcgaaactcggattaacttttgaaaatttagaggagcctgttacaggcgtatatggaacaagagtttattctgatgattcagaaagcgcaacaattacattacaaactgatgaaaatatcctgtcttttgttggagaagattcataaataaaaacagccgctgtaggaacaaaatcctacaacggctgtttttatttccacggcctgcgccggaagttcataccagactgttttatcagcggggatttcttgaacagctttttcaaaaggcttcgttcctcttgtgagagccgcttgtatttgagccggaacgccttgcagaatatctccgtgaattgctgaaccctgtcccccggagattgcatggccttttgtacttcccgtataagttcatcggcaggcgtggtatccggcgcactttcgctgtcattttcgtgcgccttgcgtatatcatggagaatgacgtcccatgttttgtgcgtcacatggcagaaaaaatcttcttcctctatctgacaggcttccaacactttgattgcccggtctgccgcagcttcggggtgttcttccagtaccatagcccgtaaagcagccagtgagctgtttgtgtcatggaagtgcatggttgctatcccgtccacatagatttctgcgtctgccagcaattccttaaatttttcatgggagataatctcacacagcagccggttattgaagcgttcacttttcagcagttccacgacttcatcactcaaatgtaattcttctatcggggtgttttcatatctccgattattggtaaggccgagcagatagtcaaccgacacctgatagaagtctgccagcttcaacaggctgccgtggttaatttccttgtattcgtcgttgtcgttttcataactgccgagggctgattttgaaatgccggtttcctgtgccagttcttccagattcaagccccgttccacccgtaaatctttcaggcgttcctgtacggaaatgcgggttttcataaacacatcgctccttcctgcggctggctgccgctgttattccttattataccatataccgttccgaaatcgtggaatttttcgattttggggcggttttcctattttatggacatacgggaaagggttcaaaaatgagctatgattaagtcagttcatcgatggattatttccaatcgaatgaccggcctgatgggatatgctccccggcgatgtagcgcaacgacctgcggcaaggaaatggaggaaccttgaccgcagcgagcgtaccaacgggaacgaaacgccgctgtgagattcaggggcaggaacgacagcaggacaacccggcagaactgataccaaaacgctacccaaacacgacaaatcggcggggtgtagtctgccccgtccgtaatactatggggcatttcaaagcggctctatggccgtattttccttgaaaatcgccccgaaacatgacaccaaaaacctttatccgcctgttcccgttgttacggctgaaatgggcggattttctatgataggaggcactatgccgagaatgagcaagaaacggaagttggagctttccttcttcctcaatgaccgggggcgtgtggcctacaacgacctgtgccggaagtgccagcataagtgcaagcagagtttccgggctgtcgtgatagactgcccccattacctgtcaaaacgagccaagcgaaaggagaaaatcagttaaatggaatttgaatttatgagcgcagacacggttctgccgccttgtatgccgctacccgccgcaatgcttcggctgccgatcagcagcacagcaaaagtcatgtatgcccgtctgctgaacaccacccttacggcagggatagaggatagcaacggcattttgtttgtccgttttcctatcatggaattagcggcagccctctcccgcagccccgtcactgtgaagcgttccctgaaagaattggaggacatcgggcttatcctgcgggtgcgccggggtgtgggagaaccaaaccgcatttacacgctgcttcccaaaggagggctgccatgataaatgagaagctggaaaagctgaatcaggagattgccaaaggcgaagccagactgcggcgggcgcagcatgaagaaaaaatactggaacaccaggtgaagcagcttacccggaaggaacggacgcaccggctctgtaccagaggagctatgctggaaagtttccttttaaggccggaagtgctgacagacgaggatgtgatggacattctgaaacaggcattttctcaaagtggcatgaaggaaatagttgcagaaagcgtgaaagggcgggtagccggggaatcccttacggagtaagggcgcaactatacaccggtcgagccggtgcgttgcgccctgccgggggcttcctgcggaaagcggatgatttccagcacacttgcggttgcttccaatcatcacaggggacgctatgcttcccctgcgctggctgcgccagctacccttttgtggacttgccgcccggaaacaccttgcactgcaagatgttcccgtccgacaagttttacaaaatccagctatacatttccggataaatgaaatataatgaagtcagtgacaaattcctttttgtggaggtgttcgaatggcttatgaattagaaaatatagtccgagagtggatggatcatcttaaaggcttgaatgtagaagtgaaaaagatgtttggctgctattgcctgtactgtgatggacaggcggtcggatggattcacaatagtgttatgagcttgcgagaagtcggactggattatttgccgaaagacataaaaaggccgaccaaggaagataaaatccaagagttggtaattcccttggattatgcaaatgctgattggcttccgaaagcggttcaagatacggctgctatacgaaaaaggaatggatgactttcggcttgattaactggaaaactttcactttgtctgactgataaaccaccgaaaaatgaatacccgccgtccactggcggcaccaccgagcaggaaatcagaaacggtttcctgcttttcttttgcccaaaatgaggtggcaaaccaccaccccatccaatcacccacaggaaggaggaagccgttatgctctgtccccaccatgatataaaaatcgttcagcgcagcaaccgccagtcagccgtagccgccgcagcttatcagagcggcgaacggttgttttccgagtacgaccagaagcagaaatactatgcagagaaacgagggatcgtccacacagaaatcatgctgccgccccacgccccgccggagtacgcagaccgcaacaccttgtggaacgccgccgaagccgtagaaaaacaatggaactcccagcttgcccgaaggatcgtacttgccataccgagggaaatcccccggtcacagcacgccggcctgatccgggactattgccgggagttttttgtttccaaaggcatgattgccgattttgccattcacgacaagggggacgggaatccccatgcccacatcctgctgaccatccgggcaatggacgaaaccgggaaatggcttcccaagagccggaaggtttatgaccttgacgagaacggcgagcgtatccggctcccgtccgggaactggaaaagccacaaggaggacaccgtggactggaacgaccagaagtacggcgagatatggcggcaaggctgggcggctacggcaaaccgctatctggaagccaatgaccgcccggagcgccttgaccttcgttcctatgagcgacaggggcttgataaaatccccactgtccacatggggccagcggtcagccagatggagaaaagagggatacagaccaacatcggcaacttgaaccgggacattaccgccgccaaccggctcatgcagtcgatccgtcagatggtgcgccacctgaaaggctggattgcagacctgaaggagaaaaaggccaccctgctggaagccttgcaggaagcgaaggaacccaccctgccggagctgctgggccaatatctggatttgcgccgggaggagcgcaccggctggacgagcaaaggccagctcaaaggcactgtgaacgacttcaacaaggttatggtcgccatccgctatctgcgggaaaaggagctgtccaccgtggagagtttggacgcctatctggataccgtcagcggacaggccgtttccatccgggcagagatgaagccgaaggaaaaacgcatgaaggaggtcgacaccatgctttcccatatcgccaactttgaagcccacaagccggttcatgcggaatatgccgctattcggtttaagaaaccaaaggaacagtttgcagccgcccatcgggacgagctggacgcctacaatgccgctgtccgctatttcaaggtgcatttggagggaaccaagtacagcaccaaaaagctgaatgaggaacggacgcagcttgccggagaggtggccgagtataaggaacgcctgtcagcggtgcaggaggatgtgaagattctccgggatgtgcgccactggctcaatcaggtgcttccgtccgagcagtaccgccagaccgccgagccgggcaagaaaccatccatccagcaggcagtcaaaggccgggcacagcgtatccgggaggaacaggccgagaaacgccagcaatcccgcacagagaaaaaacaggatatggaactttaacaggcgcttgccattttcttttcgagaatgacaggcgcttttcttattttcaggaggatttagttgaatgtatttgaagctgtcaagcagtttgttaccacccggcaggctgccgagcatttcggaatccgggtgggacgaaacgggatgtgcgtctgtcccttccatgccgacaaaaacccaagcatgaaggttgaccggcgctttcactgtttcggctgtcaggcagacggggatgtgatcgactttgtttcccgtctggaagctgtcagcccaaaggaagccgcccttatactggcacaggcgttttccatcccctatgaggacaaggagccgtccagccacaggaaaccaccgcaggaaaccccggaacagcggttccgccgtatggagcgttactgcttccgggtgctgtgcgattaccgaaacctgctgcgccgctggaaacgggactatgcccccaagacaccagacgaggatttccacccgctgtttgtggaagccctgcaaaagcaggactatgtggactatctgctggatgtgctgctctccccggatatggaggaacgggcagcctttatcatcgactgtggaaaggaagtgagcaatcttgaaagacgaatggcagagcttgccgccggagatacggcaggccgcagaacagaccatgcaagaagcaccgccaccccggagcgttgaggaagtcaaagccatgctggaaagcaccgagaaaggcggcgtccgcaacagtatccgcaactgcctgaccgtctttcagaatgacccgctgctttccggggcaatcgccaaaaatctgctgaccgagcgcaccgacatcatcaagcccatcggataccaccgtaccggcaccgccatcacggacacggatatgaattatctgctcctgtatctggaagaaacttatggactgaccagcgaaaagaagattgccgccgccatcgggatcgttgccaacgaaaacggctatcaccccatccgggactacctgaacggcctgacctgggacggaaccgagcgtatccgtacctgtctgcaccactttttaggagccgacagcgaccagtacacctatgaagccctgcggctgttcctgctgggagccatccaccgggcatttcatcccggctgcaagtttgaggtcatgctctgtctggtgggcggtcagggagccggaaaatccacctttttccggctgctggccgtgaaagacgagtggttttccgatgaccttcgcaagctggacgatgacaatgtgtaccgcaagctgcaaggccattggattatcgagatgtcggagatgatcgccaccgcaaacgccaagagcattgaggaaatcaagtcttttttgagccgacagaaggaggtctataaaatcccatacgaaacccacccggaggacagactgcggcaatgcgtgttcggaggaacttccaacgccctggacttcctgccccttgaccgttccggcaaccggcgctttctgccagtcatggtgtacccggaacaggcggaagttcatattttggacgatgaagccgcttccagagcctacatggagcagctatgggcggaagccatgaccatttaccgcagcggggattttaagctgtctttcagccccgaaatggcgcgttatctcaaagagcaccagcgggattttatgccggaggacaccaaggccgggatgatccaagcctaccttgaccgctataccggcagcatggtgtgttccaagcagcttttcagggaagccctcaaccacccctttgacgagccgaagcaatgggaaatccgggaggtcaacgacattatgaaccactgtgtcacaggctggcactacttttccaatccccggatgttccccgaatacggcaggcagaaaggctgggagcgtgaagccccggcaacggataccagcaacggagccgaaaaaatcccggagggatttgtggaggtcacagagcagatggagcttcctttctgaaaatcccgccccgttgccgactttgttgcactcccgttgccgggctggttgccggggaaagccccgtaactgcgggctttttcccctatcagcaaccaaagcaacagaaaaataaaagaaaatataaattgtaaccaaaccgccagacagagatggttttgaggttttttgaagcccgttgccggacttcgttgccgaccttctccttgtctggctattctattatggaggataactgcctatggcaaaaacgaaaacagagattcatgttaccacagtttttgacggcgagctggacgcagcggatgtctttgtgagcctgattgcccaaaaatatgggcagaataccggcaaggataatcttgcgaaaacacaagatttaggatataataaagacgaggttcagaaaaaccgtgttccgtctggattgtgcgggtaaacggttatgatgaacggatacgaatacacaggcatggacgcaattctggcgggcagcttccgggcggccatctattgcaggctttccaaagacgatgaccttgacggggagagcgccagtattgccaaccagcgggatatgctggaaagctactgcgaaaagcagggatgggaggttgtggcagtctatcaggacgatggctacacggggctgaacatggagcgccccgacctgaaacggatgttaaaggccatcgagcgcaggcagataaatcttgtgataacaaaagatttatcaaggttgggtcgaaattacttgcagaccggcacactgatcgaagacttcttccccaggcacggcgtccgctatatcgccatgaatgacggtatcgacaccatgcgggacaacaacgacattgcgccgttcaagaacatcctgaacgagatgtacagcaaggatatttccaagaaggtacattcctcgtatcttctgaaagcccagcaaggccagtttaccggctgtgtggctccctttgggtatcggaaagacccggaggacaaaaaccacctgctggtggacgaggaaaccgcccccattgtccggcaaatcttcctttgggcgctggaaggacacggccccaacttcatccggcgcaggctggaagaacagaaggtgccttgccctacatggtggaaccgggaacggggcttccgcaatgtccgcaccaaatgggagaagaaagacccggaaaacgggcggtatatgtgggacttctccgtgataaaggacatcctgatgaatcccgtttatactggggcgatagcttcccaaaagaaagactaccgcttcaaaatcggcaccattggcgagaagaagccgcaggactggattgtggtggaggaacggcacgagccgttgattgacagcaaaagttttgccatcgtgcaggacaagctgaaatcccgccagcgcccccggcaagacggggaaaccagcctgtttgccgggcttatcaagtgcggcgagtgcggcaagtcactgaccatccgcaccacccacgccaagcacccgcagcagatttacgcctgtaagacctatggtgcgttcggcaagaaccattgcacccagcaccgggtggaatacgataccctttaccaccttgtcctgaacaaaatccgggagtgcgccaaggctgccctgaccgatggggaagccattgccgggaaactgaccaacacctgtgaagccgagcagaaaggccagcgggaagcgttggagcgttccctgacaaaagacgaggaacggattgaggtactggaaaagatggtgctgcggctctatgaggatatggttgccgggcggatcagcgaagccaacttcaatctcatgctggacaagacgcagaaggaacaggccgaactgaaagaacgggttgcacaggggcgcaagaagctggctgatgaaatgcggctggcgatggacgccaaacaatgggtggacgccattcaggaatatgccgacatcacggagttggacgccgccaccttaaaccgcctgattaaagaaatcgttgtccatgaacacatcgacagcgataagacacgacacatttctatcgaaattcacttcaatctcaaacccatcccggaggtggaacaggtcaagggctgacctgtcccctccggggcggttctaaaacaattccatatattttttgacacgccgccgcctgccatcgagcaaggttttactcctatttggggataaaacagctgatggcaggaggcggtgtcgttctgatcggcacccagctggtaccgttactgtccggattgttcagctgagagaagcaggagggagatgactcatggatcggatatttgaagcgattgaagaatggatgaggaatcttctgacaggcatggtaagttccaacctgacaacaatgtataccgacgtcaatgaaaagaccggtcagattgctgctcaggttgggcagacaccgcagggctggaatggcagcatttacagcatgatacagaatctttccgagtcggtcattgtaccgattgccggtatgattatcacatttgtactttgttatgagctgatctccatgttgacggaaaagaacaacatgcatgacatcgacacctggatgttctttaaatactttttcaagatgtgggtggcagtctggattgtcagccatacctttacgattacgatggcggtatttgatgtcgggcagtccgtagtcagccgggcagctggggttatcagttctgatacagcgatcaatatagatacgatgatttccacaatggagacagcgatggaatctatggagattggtgaacttgtcatactggcactggaaacgatgcttgtaagcctgtgtatgaagattatctcagtctttattacagtgattttgtatggacgtatgattgaaatttatctctattcgtccgttggagcgatcccgtttgcaaccatgtccaaccgggaatgggggcagattgggaacaactatcttcgtggattgtttgcactggcattccagggattttttatgatggtctgcgtgggaatctatgcggtcctggttgcaaacatccagatgtcagataacatacattctgcattgttcggcgtgatggcatacacggtgatcctgtgtttcagtctgatgaaaacaggaaactttgcccgcagtatctttaacgcccattaagaaaggaggaactggcaatggcatttgtatctgtgcctaaagacttaaccaaggtcaagaataagatcattttcaacctgacgaaacggcagctgatctgttttgggattgcggcagcagtagggcttccgttttatttcttaagcaggggaatcattggttccagtaacgcagcgaccgggatgtgccttctgatgcttccggcatttttatttgccatgtatgagaaagatggacttccgttagaaaaggtcttaaaaaatatgatcaccgtaaaatttatccgtcctccagtacgcaagtaccagatggaaaatatgtatgagaaaaaatataccgtggtcagaaagaagaaagggggaacgaagggtgttaaaaagaaaaaacgatagacagccgcagagcatggaagaattgtatccggatgattactggctggatgaggaggatggagaagaagaacttccagtccccgaaatgaaaagaaaaccagtaagcggcaggctgcacgatgagccgatggtgacaggatatgaagcactggaacgccaaagaggtgtccgcagaccgaaccggaaactgacacgcagggaaaagaaagccctcaaaagggcacagaaatatgaagaaaaactgcataaggaacatgaaaaagcggataagaaaaatgcaaaaagggaagcaaagctggcagccagggcagaaaagcaggcagtgcgtgacgcaaagaaaaacgcaaaaaagaaaaagagcagacctgccgcagcaccgccggggcagcgtccggcaggaaaagcggtttccggaacgagaagcagcggggcaggaaagaaaacaccggatagtgccagagataagaggattactgcacagcagtcgattccataccatgagatgggaagggatggtatctgccgggtgcaggacaagttttattccaagacgatccgtttttatgacatcaactatcagctggcacagaatgaagataagaacgccatctttgaaaactggtgtgatttcctgaattactttgacagcacgattcattttcaactgtcctttatcaaccagcacagcaacatggcagagtatgagaaggtcatccatatcaatccgcaggaggatgaatttgatgacctgcgtatggagtttgcccaaatgctcaataaccagctggcaaaaggaaacaacgggctgatgcgtaccaaatatatcacattcgggattgaagcggagaatatccgggaagcacgaccaaaactggaacgtatcgagtcggatattctgaataactttaagattcttggggtatctgcctatccgctgaatggggaggatcggttacagatcatgtatgaaacctttaaccaggacagcaaagttccgttccatttctcttatgacgatgtacttcggacagggcttagcaccaaggattatgtcgcaccgaccagttttgtttttaaaaatggaaaagattttgagatgggaggtacgatgggagctgtttcctatttacagatcctggcaccggaacttaccgacaagatgctggcagagtttctggagatggacagcaacctgatggtgaatttccatatccagtctatcgaccagatgaaggcgatcaaactggtaaaaagcaaggtgacggatattaaccgtatgaagattgaggaacagaaaaaagcggtccgggcaggctatgacatggatattatcccttcggacttaaatacatacggtggggaggcaaaaaggcttctggaagatctgcagtccagaaatgagagaatgttccttgtgacagcattgttcttaaatactgcaccgaccaaacaggaactggaaaatgtggtgttccagactgccggtatcgcacagaaatataactgtgcattgaaacggctggattaccagcaggagccgggactgatgagctgcctgccgcttgcgatgaattttgtaccgatcaaacgggcactgacaacgacatccacggcaatttttgtcccgtttaccacacaggaattatttatggctggggaatctatttattatggattaaatgccctgtccaataaccttatcatggcagacaggaagaaactgaagaacccgaacggactgattcttggtacaccgggttccggtaagtcgtttgcggcaaaacgagagattgcaaatgcatttatcgtgacgaaagatgacattatcgtctgtgacccggagggggagtattatccgttagtccgggcatttcatggacaggtgatccgtatttccccgaccagccacgattatatcaatccgatggatattaacctggattacgctgacgatgatgacccgctttccttaaaatcggacttcatcctgtctctttgtgagctggtagtaggcggaaagaacggactggagccggttgaaaagaccgtcattgaccgatgcgtaaggctggtctatcaggatttcctttctgacccggtaccggaaaaaatgccgatcttagaggatttatataatcttctccgtaatcagaaagagcaggaagcacagcgtctggcaacggcactggagatttatgtcaatggttccttaaaagtgtttaaccatagaaccaacgtggaactgagtaaccgtatcgtatgttttgacattaaggatctgggaaaacagctgaaaaaactgggtatgctgatcgtgcaggaccaggtgtggaacagggtaacggtcaaccgttctgcgaataagagtaccagatattacattgatgagttccatctgctcttaaaagaggagcagacggcagcatacagtgtggagatctggaagcgtttccgtaaatggggtggtatccctacgggtatcacacagaacgtaaaagacctgttagccagccgggagattgagaacatctttgaaaactcggactttatcctgatgctcaaccaggcatctggtgacagacagatccttgcaaggcagctcaacatttccccacaccagctttcttatgtaacgaacagcggggaaggtgagggactggtcttttatggcagtaccattatcccgttcaaggataagtttgataattctctgatgctgtatgccctgatgacttctaagccggatgaggtggaaaagcgtaagaaacttggtatcggggaacgggacgattaaagaaataaacgaaacaaaataaaacagagtagaggatgagccggaggaatacttccggcaatttttctgcccggaaatcatggaggattacaagatgaaagattacagaaacatggagagatgcagcggtgaaccttgctgcatatttgcagaaagaatctgtgcagacaatgaaaaggagattttgaaaatggaaaaggacacaaaggaaaaagtaacggctgatgaaatgatggatgatcttatttatctggcggaactgattgatttcatgggaattacatcttggctggctgtaaggggaactttaagtgagcgaatgacagacaagctgacggattccattgcagggatggcagatgaagtgttggagaaatgggaggactatcaggataagacagaataaccgggacaaagcagtaaaggggatggtcaaagttgcaggagcatgagtataaggcgagagataaaaccgtccagaaaatgagccgggatggactgcgggaagaaaacctccggaacaaggaagaaaaaaggatcaccgggcgggatacggataccgagatttcccgcagtgagaagaaagaggaactagattttagtaaacgcagacatgaacggctgaaagaagaacgggagatggaacagccggagcagagttccagaaaacccagatatagtagggaacatgcagatatattggatgatgaacaagatatagcaactgatgcggatgtagaagaggggcttacagacgatagcagcgagaaccccaaatctgcctttcgtacagagagtatccgtggacagccaagaggggaacgggcatatctggagacagttgcagacagccgggatcttcggaagaaaaagatggtcagggattatgctgcaaaggaaagaaggaaggaaaaggagacttccagagaagaaaaagcagccaaaagagaatctgcccgttaccgggaaacttccgaagtgatggaagattccctggataagttccacgaggagatcaaaggcaagtccaaaagggaacgggtgctgaaggaacagcggaaaaaagtttcccgtctgtcttttggtgatgagggtgacggcatggtacatggtgccgggatcggtatccggaatccggcatcggcagtcaaagatgcggcagtcacagcagcacactggaaaacgcacgaaaaagaggatgaaaatgcggcagtggaaggggcacaccgggcagagcttgtcggggaaagccttgcaaggaaatccatctacatgcgggaacggctgaaagggcgaagggaagaatcccggagattaaaagaaagcgtcctggatgaagcagaaaggagcaggctgatatttgagactgcctatggaaatgaagcgaaggacgcagtgaaaagagaagcagagaagaaaaagaaatctgccctgcagaaactctttcagaagaagcgttaccagaagcagtatcaggcagccagacagagtaaaaaagtaaaggatgcagcgatcacttccgcacagaagtttacggaaaaagcgaaagatgccgtcaagatggtggcggcacagaaccgggggatttttgccacggtagctgtctttgctctgatctttgtgctgatcgcagccagttttaccagctgtacggcatctttgcagggagcttcttcagcaatcatctctaccagctattccagtacggatgaagatatttatgccgctgaaaatgcgtaccgtgccttggaagaagcactgaatacacagatcaatcagatggaatccacccatccggattatgacgaataccggtaccagattgatgagatcggtcataacccatatcagttgacctcttatcttacggtaaaatacggcggcttcacttacgatgaagtggcagaggagattaaggatatcttccgacagcagtatggaatcaccacagactctaccagagaaacagttacagaaaccaagactgtccgggtaggggagtccttgggactggttgtgacaagtgggtactgtaactgcccgatctgctgtggccagtggagtggcggaccgacagccagtggggcaatgccgacagcaaaccatacgattgccgtggatgcggcgaatccatttgtgccgatcgggacccatgtagtcatgaacggtgtggaatatgtagtagaagataccggagcgttcgcaagatatggggtacagttcgatgtttactatgacaatcatgcggcggcatccgcacatggacaccagacatgggaagcctacatagcagacagcaatggaaaccaggaagtgcaggtcacgactacaaaagaggtgaaccgtctggatgtgacgatgacaaaccacagcctggatgccgtgttaaggagccgtatgacagaggaagaacaggaacgctacgatgcgtataacaaatattacggcaaccgtgattatctgtttgatctaaacagcatacccaccggaagcagtggatttggttatgacataccggcagatgctttatctgatccacagtttgcaaaaatgatacaggaagcagaaaaatatctgggtgttccatatgtatggggcggttattccccaagtggttttgactgttccggttttgtgagctgggttatcaataactgtggaaatggatggaatgtcggaagatgtactgcagatgagctgcggtcacactgttcgcaggtatctctatcggaggcaaagccgggagatctgatcttcttccagggaacctatgacacaccgggagcaagccatgtgggaatctatgtcggcaataacatgatgatccactgtggcaagcctgtccagtataccagcattgcaagtgcttactggcaggaacattttatggcgtttggtcgtctgcattaaaggaggtgacagggcagatgaacatgaaattaaaaaaacttctgaatgatattcagaaaacggaggataagattgctgaattacaggaacacctgaagcggcagaatacattgagacagcagatggaagatatagagatcgttaagtcgttccgttccatgaagctggacagccgcagcctgcttgtcctgcttgacgggattcagaaaggaaccgttacgatccagatggatgaggacggtggtatcacggtggaggatgcaaaagctccgcagaaaaaggaaaacaacgcagaagttcacagaccacctgttggtcagatgacagaaagagaggttttagacgatgaggaataaagtgctaaagaaactgcttatgattgccatggcagtcaccatgatctccgggacatccattgctacggtttatgcaaatgcaaacccaccggcagaggagacaacgacacaggtagtagaagaaacggcaacagaatcaacagaagatacggagaagaaagaggataccggaagggtcaccggggaaggggataattctgctttttctactccgggaaatgcccagctggtggatgataaggaaaatgatgatacgaaacagttccttaccatccagaccaagaagggaaatacattttacatggtcattgaccgttccagcaatacagaaaatgtatatatgatgtccctggtcgatgagaatgacctggcagaatttctggatgagacagaaaagagcaaagaaaccgaagaatcaaccgtagtgatcccggaaaccacaccggaaactaccccggtagcagaggaggaaaccggagtgaagaaagaagaaaagacaggaatgaatgtaaaaggacttggagcaatcgtacttgcagcgattcttggagtggcaggtatcgccgtttataaaaagcatggacgtggcaaagaggatgactatgtaagcgaacagctggagttctctgacggaccgtatgtaaatgaagaagaggatgaggaagaagaataaacttccatctccaaagaagcaaccaaaataaggacaggggcagccagagcagtttggctgcccttttttcagaaaggacaaaaaaagcgtatgtcaaaatttttagtgatcgcagagaaaccaagtgtggcacagagttatgccaaaaatctgtcagcttataaaaaagaggacggatatttagaaggggagagctgtattgtcagctggtgccttgggcatctggcagagtatgcacagccggaggaatatgacccgaaatatgggaaatggcagtttgatgaccttccgattctcccgcaggtctggaagttgaaagtttccagagataagaagaaacagtttgatgtgttaaaaagcctgatgaaccgagcagatgtggactatctggtaaatggctgtgatgcaggaagggaaggggaactgatcttccagagagtgtatgaccttgccggatgcaggaaaccggtgaagcgtttatggatcagttccatggaagatacggcaatccggacaggttttcagacaatgaaaggagcagaggaataccggaatatttgcatggctgcggtatgcagggcacaggcagactggctaatcggcatgaacggaaccagggcatatacgacctgttattttaaacgtctggttgtgggcagggtgcagacgccaacgcttgccatgcttgcggaacgtcaggataagattgagcattttcagaaagaagccttttataaagtagcactgacagacggaaggcttacggtagtttctgaaaatattgcaaatgaggaagcagccgatctccttgcttccttatgtatggattcggaagcagtgattacacaggtaaagagggaacaaaagaaagcgtttcctcccaaactttatgatttgaccagtctgcaaagggaagcaaaccgttactttggctatacggcaaagaaaacactggatatgctgcaggaattatatgaagaaaagctggtcacttatccaagaacggacagccagttcgtgacggaggatatgagggataccgtagaggaactggtagggaaaatgccagtcttacttccgttcttggattatggacagctgggacataacatcaccagagtgattaacaatgcaaaagtatccgaccatcatgcgattcttccaacaaaagaagccgtagaaaaaggaatctctgatctgacagcggacaaaaagaacctgatgatgctggtctgccagcagctggtgcaggcaacaggggaagagtatcagtatgagcagacggatattacggtcaaatgtcagggacatgattttaccgccagaggaaaagtgccggtgcagatgggatttaaagcggcggggaatgcctttaagaaccagtgcgtgaaagccaagccggaagaagaaacggaaaaagaaacttccattccatatggatatgaagaaggaatgacgctttctccggtaaaggcagaaaagacagtgcattttacttccccgccaaaaccattcaatgaagataccctccttgccgctatggaaaccgcagggaataaagactttgattcggagacagagaagaaaggactggggactccggcaaccagggcaggtatcattgaaaaactggtttcttccggctatgcagtcagaaaaggaaagcagatcttgccaagcacagagggcagggaactggtgaatgtcatgccggcttatctgaaatctgccgcaatgactgccgaatgggaaaatcagcttttaatgatggaaaaagggcagatcaccgatacacagtttatgggtgagatcacttctttagtcggtaagattctttctgtgtgcagggaaataccggaaacggaaaggagaaggttccagaaagcaagggaagtgattggtaagtgtccggtctgcggctctgatgtctacgaaggaaagcagaatttttactgctccaacaggcagtgtgattttgccctttggaaagaaaaccgtttcttaggaagcatggagaaaacactggataaaaagatggcagtggagcttcttgataaagcctgcacccatgtaaaagggctgtattccagaaaaaaagatataaagtttgacgcagaccttttactgacactggaggacggaaagccaaggttccatctggaatttccaaagaagaaataaggcaaggaggtaggcagtatgtcgaaattacaggacatccgggaactggcacaggaacatgcgacatcggtgagcagttcgccaagggactggatgggttatatggataccgcagcgagactataccggtatccttttacagaccagttactgatccacgcacagcatccacaggcaaccgcctgtgcgtccctggaactgtggaatgagaagatgttccgctgggtaaaccggggagctaggggaatcgccctgcttgacgagaatggtcataataccagactccggtatgtgtttgatatttcagatacgcacatggtggcaggcggaagaagcccttacctgtggcagatgcaggaacatcagcaggaagagattcttacccatctggcagaagcgtatggtctggaagaaaaagatacagggactttatcggatgcgttgatggcggttgcaagggaaatggtcgcagacagtctggaagaatatctggacggcttggaatatgcagcggaaggaacgtatctggaagatctggatgaagttacggtccgcagtgatttccgccagcttgcaacggacagtgtatattacatgctttgcagacggtgtggtctggaaccgatggagcttctggaagaagaggattttatgcatattaccgattataaccggctgtctgtactgacctttcttggaaatgcagcaagccagatcagtgagagtgttctgattgacattggaaggacggtacataaaatttctctggaagaagccagaaaagaggttgaaatttccaatgaaaggaattataataactttaacacgttaatgcgtgaaaataagggcgtagaaaacaacaaagaagaaaatatcgagaatgaaggaggaaccgactatggaactgacatatcatcgcaagggggattacctgtttccgaacctgaccgtagaggaggaagaagtgacaatagggaaatacgggatgcttcggaggacattcctgaaggaacacaagaacagcctgtatcagagcctgttcctgacaggaaagctgaacagccatctggcagagatcgagaaggcagcacaggagaggatggacagccagatggagaaactgctgaagaaccatccggcaccggacaaggaagcagacccgatggcctggacagcacatatgaacgcactgatggcaacagcggaagagagcatcttgacggaattggtatacagctagttgaagatacaagagaagatggactgagcaaagcagaggaagaaattgcctctgctttatctttgcccgaatatcctatagcaaatgaacagaaaaggcagattggtgaaagagtagctgctttttatgccggggagattcctattccggaaagtgttgtggatgatattttaaggacgggaggaaaccggacaggaagccagctgcgtatcatctataactttatgagtgaacagtcaccgggagaatacacggagtttgtaaagcgtgagtatagaaaaggcggcaaaggttttcagatggatggaagggagtattccgtctggtttgatgaaactgggatgcagatcgcagtcgggcatacggtggcagaccagattctggataaagcctttttatcctggaaagatgtcagcagacgtatccatcagcttttaaatcagggagaatatgcaccacagtctgtattggatgcggcaagaagtaatgcagtaaaagaacacgcccaggctcttgcctatatgaaaggggatatggcagaaggagtagcggagattgtttttgacgaagaggacttaccacatcttcgcagtatctatccggagatcacagattatctggaagaaaaattggaagatccccagtggctttcggaactgaatgaaagactggatgcactggcagaagcctatgaggaaaatcattccattatgcgtttccatcattataatccggtcaatatctccagacagttccagaagtttgcagatgaagtgatcccataccaggcaagagagggatttgcatggaaagaacagcagatgttcattacacaagacgagatcgacgcatttcttgtcagaggtggggcgtattccgaaggcagactcaggacatattccttttatctgctgcatgaggatgaaagatcgaggacaggttttatcaaggaacagtatgggatcggtggaagcagtcatgcactgtctggtgccgatgattcacacgcaaattatgatggaaaaggattgtttcttgcaagaggtgcttatggaaatccatatacatcagttttattatcttggaataaagttgcaaatagagtagcttatctgataaagaatgaccagttcctgcaggcagaagattatgctcgtatgtcggaatatgaacgggaacagatggcaaacaaggtactccgcttttatgaccgtcttccggaagagatagacagaccatttacggatgatttcttctgggaaaaaccaggaaaagaaatggtggcagttttagagaatccagagcaggcagaagaactgttacagaagatggatgcagcattggcagttctgccattagattttgaggcatatgggacaaactaccagcagaaaacagaacttctttcagaacttcaccagtatgcagaaggaacctatacgattttcccgacactggaagcagaaccgtcttttgtggaaccatccgggcaccagatgaccatgtttgatttcttagatacgaaggcagtgacagaaccgaccgtagtagatatgtcagatgtagaggaaatagaagaggaagaggttactgctgaagaatctatttcagagagtcaggagcaggaaataatagaaacttctgagggacaggaacagaaagaaccagaagaagaggtaacagctaaaacagcagaagaattggcggagtcctgggatgaaggtgtttttgagtatcaggggtatcattttgaagcagtaggggtattgccggaaggaatagaaggaaaagatctggttgcacagacccgttccaatacagaactgcatttatcaacctaccatacagaagatttcccaaagtattcgtatgatgatttttatgcagtcagcaatgcaccgactgccgatgtgttccggtgtctggaaaccggacgcaattatattcccggagaaaatgaactgtttggatatgagggagaattccagccatatttaaaaccggaagtagaaaagattgtaacagaaccgcataattttcggattcaggataatgaccttggggcaggcggtccgaaggcaaagtataaggcaaatatggaagccatccatttgttacagactttggagaaagaagaacgtctggcaacacccgaagaacaggaaatcttatcccgttatgttggctggggtggtatcccacaggcatttgaggaaaataacagcagctgggcgaatgagtatctggagttaaagaataccttatcaccagaagaatacagtgcagcaagggcatcgaccttaaatgctttttatacgtccccaaccgtgatccgaagtatgtatgaagtactggaaaatatgggactgaaacagggaaatattttggaaccgtcctgtggtgtcggtaactttatgggactaatccctgagagtatgagcaaagccaatatgtacggtgtagaactcgacccggtttcgggaaggatcgcaaaacagctttaccagaaaaataagattgccgtgcagggatttgaggaaaccagttatccggacagctttttcgactgtgtgataggcaatgttccgtttggagcgtatcaggtcagtgaccgaagatatgaccggcatcattttatgatccatgattattttattgcaaaatcccttgatctgatccgtccgggcggcgtagttgctgtggtaacttccagtggaacgctggataagcagaatccggcagtgagacagtatatcgcaaaccgggcagaactgcttggagctatccgattaccgaataatgcgtttcagagaaatgccaataccagtgttgtttctgatattttgtttttccagaaaagggacagggcatccattgaggaaccggaatggttaaatctaaaggaaataccggaaggctattcggttaatgcttattttgcagagcatccggaaatggtgcttggtgattttactacagaaagtacccagtacggaaagcaggaagtgaccgtaaaaccaaaagaaggcattaccttagaagaacagttaaaagaagcgattaggaatatccatggtacgatcacggaactggaactttcggatacagagctggaggaggaggttgtctctatcccggcagacccggaggtaaagaattttagttttactgtggtagatgatgaagtttattaccgggaaaactctgtgatgaaccgcatggagcttccggcaatgacagcggaacgtgtcaaagggatggtgaagattcgtgatattacgaatgaactgatccagtgccagatggaagagggaagcgatgaacagatcacaaagctgcagggaaaactcaatgaagaatacgatacctttacagcaaaatatggtcttatcagcagcaatgccaataagcgggcatttagtcaggacagcagctattgtcttttgacttctctggaatttctggatgataagggagaactgaaacggaaagcggatatttttaccaaaaggacgatccgccgggcagaaacggtgacttctgtggatactgccagtgaagcacttgctgtttccattggtgagagggcaggtgttgaactttcctatatggcacagctttccgggaaaacagaagcagagcttaccgaagaactggcaggggtgatctttaagaatccgatcagtgaaaaatgggagccgtcggatgaatatctttctggaaatgtgagggagaaactgcagatcgcaaaacagtttgcagaagatcacccggaatatcaggtgaatgtgcagtatttggagcaggtacagccaaaagatctggatgcatcagagattgaagcaagacttggggcaacctggatctccgaggattacattacacggttcatggcagaaacattccatacaccaagatattatgtagggagcaaggtcaaagtccagtatgccgaagtgaccggacagtggaatgttatgggaaaaaatgtggacagctacggaaatgcccttgttacttccacatatggaacacagagagccaatgcctaccgccttttggaagatgccttaaaccttagagataccaagatttatgacacggtacaggatgccgatggggaacaccgggaattaaatcggaaggaaacgatgctggcacagcagaagcaggagctgatcaaagaggaatttaaggagtggatatttaaagacctgcaccgacgggaagatctctgtaaaatttataatgaacgatttaacagcatccgtccacgggaatatgatggaagccatattcagtttgtcggcatgaacccggagatcaccttgatgccgcatcagaaaaacgcagtggctcatgtgctgtatggaaataatacgttattggctcattgcgtaggagcaggaaagacgttccagatgatcgcagccggtatggaatcaaaacggctgggactctcacaaaagaatctttatgttgtgccaaaccatctgaccgagcagtggggcagtgatttcctacgtctctatccgggagcaaatatcctggtggcaacgaagaaagactttgagccggcaaaccgaaaacggttctgttcccgtattgcgacaggggattatgatgccgtgatcatcggccatacgcagtttgagaaaatccctctttcaagagaacggcagattgccatgctggaagatcagatcgcagatattacgttttccattgaagaagcggcacatcaggcagggcagaattataccatcaagcagttggaaaaaacaaagaagagtctgcaggcgaggatgaagaaactcaatgaccagaccagaaaggatgatgtggtaacttttgagcagttgggtgtagaccggctgtttgtggatgagagccatagttttaagaacctttttttgtatacaaaaatgcggaatgtggcgggtatctcacagacggatgcacagaaaagttcggatatgtttatgaaatgccggtatatggatgaactgacaggcggcagaggaatcacctttgctacaggtactcctgtatcaaatagtatgaccgagctttacactatcatgcgttatctccagtatgacacactcatgcgtatgggtatgggacactttgattcctgggcggcaacgtttggggagacagtaaccgcaatcgaattatcaccggagggctatactttaataggacgataaaattaactgtcctaaattgaaaatacataaggaaggaggttaagagaatgtcaaggacttcaaagattacggcactttacgagagattatcaagagatgatgatttgaatggcgagagtaattctattaccaatcaagatgtaatatgtagagggtggtttctaccgcctaatactattacatgactggcggctcatttgtggtgaattggtctggcagttgtgggaaaggaaaaaaatccgcataactgctgacattttagcacgaagggagcatgaaaatgaagtctatttttgaagaaatgggcggcacatatacgaaggttggcgattactatatccccgaccttgcgctgccggagaccgaggaatatcagatcggtaagtatggccgtatgcgccgccgctacttgaaagagcatcgtcccgtcctttatgcacactacctaacaagctgcaccctgcatgaacatcttgcagagatagacaaatcctgcaatcagcgtatggagatcatgtgcgaagctatggcacgactggaaggtgtgaccgaggcacttaaagctaccgatcaaatggaatgggtacggcgcatgaacaacattcataaccgtgcagaggaaattgttctgacggagcttgtatattgctaaacacatgttagccccgcatcagcatgaatgaacgctggtgtggggctaattctgtatcacttagctctttatattccagtagccttttcggtcagacccgatgcgctcgatgattcctttttccttcagctccttcagacgctgagaaactgtttttctgctgatagatagcttatctgctatggtggtagatgtgtatgcaggatcttcggaaatcagggccagaatttgcatggatttttcatccaaggtttctgttaccttttctgttaccttttctgttaccttttctgtcaccttgtaggtggcagatcgaataacccgatcctctgacgctgtaaactgaatcataatatcgccgggatgcacggtgtacgcaggaagcgggcttccatcttccttgcaagcctgacagattttctcaataccacgtccccagctctcgatgaagccggtcaaataatacacattcgcaatcgccgtgttgtaagggcgggatgcgtgtttggacatcaggctgtctgccgtccagttgtctggaagcctaccacagttagcgatatacagcttatcctcatacacgctgatctgaatcggaacgccgctttcatattgcttgtggcatagagcgttaagaagggcttcacgcagggcagcgtcgggaacaaaataacgctcaatgcgctgcatcccttcgtaagtgattttcgctttcatatatttcagatggatgacttcaatgatcttgtcaatctgttccaacaaggagccgtgaatttcatcctgataacggagatcggcatcattctcgaaaaagccgatttttgtgtatgcgcccagctgccagcggtcagggtctttgcagaacagcagcatcgctgcgttggtataatacccggcattggtcagacgcagcttttccattaaatccgctttgtcctcgtctaaaacgctttggtcgatccggcccttcttggcggcaagggtcttgaatctcttgaccaactcatcatcaatatcatccaacgtaaatcccggcaagggcatattatcccacgaagcaccacgtttgcgtagaatgaagctctccagttctgggccagaaagggtctgcatggtgctgccgcttctataataatagacacctttgcagtttatggcaacgggatatggtggaacaacgatttccagatattctttcccgtcacgctccagctgattgacatccaccacgatgctcatggcatttcggattttgtttggaacatcctccagcagcttgcggatattgggcaggccgataacttttccatcatcgtcacagccaatataaatcttgccgccctgtgcattggcgaagccgcaaatccattccagatagtcatccttccacttagctttccattctatgttctgattttcaggcattattatcaccatcctctgatttattctttccccggctcttataaacattatactgatttttacaccttgcactgcaaaaagcggagttagcccggttactcaggaacactttctgacactgcttgcacatccgcaacggctttgtgctgtccaccagcatgaagctgaacatcatctgaatccccaacagcagggaatggaaatcccaatagatcgttggcctatccaacagctctatatgataggtgggtgcaatgccgccaaatgcagccatagacttacgcagcatattccggctttcttcctccatggaatcatagtcattataatagaagaaagaggtcagcatattaaatgcccaatccttgagttgctgtgccacccaatcgtaaggctctgcatacgcccgctggaagctcatggtctttgccatcggctcgtccataaaggtcatggtcagtgcaatcattgcccggtcgctggacacattccaactggattccacaccgttcttgaccacatccagcctatcaaaggggtaaaacagggacagatacttctccgtctccatcgtttcttccttgataaaatggttctttggcagatataccgcctcataatccataaaggacggcgtggtgggcagggccgtcatcaggcccagcagcccatagtgggtaataaattccaagattgccttttctacctctggctcagagcttttcttgccgttcatcatcagcatccccacattcagagcatccagcacaatgtccggggcttccttgagtgggttatagacatccggcctggcatcctttgccggggtgatgtatttcttcccgtccttgcctgttttgatttcatagcgttcataccgcacccaatgggaacgggattgctcaaaaaatgtattcataacgcaaatccttcctttcggtcatctgcttatcaaattcaatcagatcattcgctgtccttgctgctgccaagggcagctttctttttcctcggctttgatttgttctcccggaggataacggcgtccttgccataggctttcagcaaaagcccatattcctctaagaactgccgttcccgcagcgttaggcttccacagtcgttctgtttttccaaaaggtaatcataaaccgctctttgcagcttcttgtggatattctttcggagctttctaatgtttcggtctgtctgtccccgtatcatacccacctgtatggtgctgtactgccggatggacaggtaatacagcacttccttctgatcaatggtaaggctgcgtatcagctcagaaataaatgagcttgcaaccaactcatgcagttcataggggcaagaaaaaatgatatccagaaaattgccgctggcaagctggcggtatcgtggcagattcaaatacagcggaatcatcttcggattgggaactgccatgtattctaacggaacatctccccggagattttcatggtcacgctcccgtcgttcccgattccgatccaacctgtcccattcgctgacaacgtatcgaaagtcgtcctctgttcttgcagcatcctccagccgtgccaacgcctctgcccgtatctggcgctttaagcgtttttcgctgacaggagcagcttcttcctcttcgtcctccagttctacggtgtagtcccttgggttttcgtcctgctccagctctctttccagctctaaggctcgttcttcggagaggatttcctctaactgctcgttttgtatcgtcagatcggaggcttcatcccattcggttaggtcatcaccgtcatccgggaacaggagaaatgttctattttcatctgtcatgacctcacctccgaaaattttttgaatttctttcaaaaacagttccgatttacaccccggatttctcctattagtgagagggtaatctgataagcggttatttaggttactttttcaacccgtatcaagagaaaggaggacgcaagttgcggtagctttatgaaacatgacacaagatgccaccgacttacatcagtcggaaccaccattagtatatcaaacgaacatgaatttttcaaggaggaacgctatggataaaaacaaacaggcacagtatatgataagacgtattggcggcaccacctacaaggtgagagtcgctttcagtgaaagtgggaaagagacaatggaggataaaattttacgaatgatacgcaacgaagtagttacaaacgacggaacttgtgatataattggtgtaccacaaatgagccgtcagtctgaaaggagcgcatcatgagcatcattcagactgaggacaagatcaccgccttatacgaacgactttcccgtgacgatgaccagattggggatagcaactccattgtgaatcaaaagaaatacttggagggctattgcgcacagcaggggtacacaaactttgcccattacacggacgacggattctcaggcggcacatttgaaagaccggcatggaaaaagctggtggcagacattgaagctggcaaggtggctcgtgtgatcgtaaaggatatgtcccgaatcggacgtgactacttgcagaccggcttttacacggaggttatgttccgtcagcatggcattcattttattgccatcgccaacagcgtggacagcaacgaccagaacagcaatgaatttgctccgttcctcaacatcatgaacgagtggtacttgcgtgatctgagccgcaagcagaaaaccgctatccgtgtgaagggggaatcaggcaagcctaccaccaacagtgccatctacggctataagaaagacccgaacgacaagcaccattggttgattgacgaggaggccgccgccgttgtgcggcgcatcttccgtctgaccatcgagggaaaaggcccctatgacattgccagaatcctttttgaagataaggtagaagctccggcggtctattttgcaaggaaaggcattggcgtttggaaaagtaagaccgagttcgcatatccttataactggagcggctatattgtggggcagatattgtctaagcctgagtatatggggcatacggtcaatttccgttcccacaagctgtcatataaggacaagacctctattcctaatcccaaggaggactggctgatcttcgagaacacccatgaggccattatcgagccggaaacatgggagcttgctcagcaactgcggaaaacgccacggcgtattgataccataggcgaagccaatcccctgaccgggcttttatactgtgcggactgcggcgcaaagatgtataatcatcgttccagaggcggtacagaaggcactccgtatccgtcggatttctttgactgctcctcttatacactggcacatcagaagcatggaaaggactgctgcgggcactatattaccactaagtcgctgcgtatccttattttagagacaatccgcactgtcagccagcttgccatagcagatcgggaaaaattcaccgagaagatacgagccgcttcacaggtcaggcaggtggaggcggccaaagatgccaaacgaaagctgaacaaagaccgtaagcgccacagtgagctggatacgatcattaaaaagctctatgaatcctttgccgtaggccgaatttctgaggaacgctttgacagcctgcttgctgagtacgaagtcgaacagaaaaacctttccgcacagattgcagaaacggaggaaagcctgacgagctatgaggaagatactgcccgtgtagagcagttccttgctttggcagaaaagtacaccgatttctccgagctgactacaccgatgatcaatgaatttattgataaaatcatcgttcatgccccggagcgcatcgacggggacagaacgcaggaggtagaaatcttcctgaaattcatcggaaagtttgaacttcctgccccggagctgacagcagaggaaatcaagcggcaggagcagctacgccagcatcgcatcaaaagccgggagcgctatcagttgattaaggccgggaagcacaccgttgggcagccttttcagctaacctgtaagtgctgcggtcagggatttgaatccaaaagctcggctgctatgttctgcggaccgaattgccgggcgaagttctaccggcaggaagcggcagaaaacaggcggcgtgactgcacttgtgaaaactgcggtaagaccttttccaccacaagaagcaatgtcaagtattgcagtgatgagtgccgatatgaggggcatatcaaaggccagcgggttcgcaatgcagcgaacaggaaggaaaaactggcagcggagacagttacctctccggcttaatatttccaataaaacaataaattttgaggaagcggtttgccttatatcagggcaagccgctttttctacgcaaaggaggacacatgaatttattcgaaaccgtaaaaaacaacgtcagcctgcgggaagcggcacaggcgtatggccttgaggtcaaccggcacggcaaggcgctctgcccctttcacaatgacagacaccccagcttgtatgtggcaaacgaccattattattgctttacctgcggagagcatggagatgtcattgacttcactgcaaggttgtttgatctcaagccctacgacgcagccatgaagctggtgatagactttcatcttgacccggacaagccgcccagcgcagcggcactcaatgcaaagcgtatccgaacagaagcacagaagctcaaagaaaacgagcgtctgtgcttttctgttttatcggactattaccgttgcttggaggaatggaaagcatactatgcgccgcaaacgccggatgagccagtccatgatttattcgtggaagcctgccacaagctcagtcagattgaatatgaactgaacattctcacctttggtgacagctatgagcgtcgggaaattgtacaggactggatgacggatggtgaaatcatagcactaaaggagcgtctggaacaactgcgaaaggaggaaacctatggacgaattgaataccccaatggttatgccgcctgaagaaagcattcccgattggtatgatggaaaacgcatcaacgaagtgctgttttgtcagcagttcttaaaaaagcatcccatgaaatgtgtcagaggaaggctgttcacagtggatggactgattgaggacgaggcgcaaatcggcaatctcattctggaggagatctccggctgtctgacctccgggctttccaaggtggtggcaaatctgctggccagtatcaagctgcaagcctattcgccgcccctgcccatcgagactgaccgtatccatgtggcaaacgggacactctttctggatgggcgtttcaccgaggacaaaagctattgcaacaaccgtctgagtgtggcctatctccccgatgcaccgccgcctgtgcgctggctgcaatttttatccgagctgcttgtcccggaggacattcccaccttgcaggagtatatgggctactgcctattgcctaccacaaaggggcagaaaatgctcctgatgattggtaagggcggcgaaggaaagagtcgaatcggacttgtaatgcgctccatgctgggagataacatgaataccaccagcatccagaaggtagagaacaaccgtttcagccgtgcagacctggaaaacaagctgctgatggtggatgacgatatggatatgagtgccctgcccaagaccaactatatcaaatccatcgtgacctcagagtgcaagatggatatggaacgcaagggtgttcaaagctatcagagccagctttatgtccgctttctttgcttcggcaacggcgctttaaccgctttgcacgacaagtcagacggcttcttccgcaggcagatcgtgttgaccaccaaggacaggccagcaggacgagccgatgatccatttctggtggataagctgacacaggagcgtgagggcatctttttgtggtgtctggagggtctgcggcggttgattgggaacgagtatcagttcaccatcagcgatagagccaaagaaaatatggagacagtaaagcgcagcagcaacaatgtgatcgagtttttgcaatccgagggctatatccgctttaaggccgacagcgaagccagctccaaggctatctatgaagcctatctccgctggtgcgaggacaacgcacaaaagcctatgtcagcaaatcgtatcagctcagagctggcccagaatgaacggctttataatgtggaggctaccaacaatgtgtacgcagccggaaagcgggtgcgtggatttatcggagtggaggcgatgaacttgcttccttattaaatatgagaactggacttcaaaactgccgtacatgccgtacacgatgtacggcagttctcaactccgttttcaaaaagctattttaccgcaaaatcagcgttctttatgtgcaatgtgctgcgattaccgcattttcttgcggtataaacagcgatttgacaaagcaaacgcaaaatccaaagaccaatcggtgtacagcggcgtacagcactggcgtttaccgtacagagccgtacacaaacaatctattttcaaggccgcacagcggcagaaaggacaaactatgaactatatgaacaataaccctataatcatcggcatcgaccacggctatgggaatatcaagactgcacattgctgctttcctacgggcgtgatcatctctgacaaggagccgaccttcaaaagcaatctgcttgtctacaacggcagctattacaccgtgggcgaaggtcacaaggagtttatctctgacaaaatgacagacggtgactactatattctgacccttgctgccattgcaagagagctgaatatccgcaagcagacctctgcccgtgtgcatttggcggcggggctccctcttacttgggtcagcgaacagaaggatagcttcaaggcgtacctgttgcagaatgaaatggcggatttcattttccgtggtgtcagctatcatgtggagtttgccggagcggacatcttcccgcagggcttctccgctgtggcggacagactgcggggattcaagggcatcaatatgctttgcgacattggcaacggaacgatgaatgtcatgtatatcaacgagcgccgtccgctatctcagaagtgcttcacggagaagtacgggacaaaccagtgcatgattgctgtccgggaaaatctcatgcggcagtttggcgcatcggtagatgatacgattctggagcgtgtgattcgctttgggacggcagacatcagcgaacgctacctaactgctatccagaacacagcgagggattacaccgcaggcatcttccgcagactgcgtgagcatgagtatgacccggaactgatgaggctctatgttgtcggcggtggaagctgcatggtgaagaatttcggagaatatgatgccagccgggtgatgatcaatgatgacatctgcgccacagccaagggctatgagctgctgtctgcacagaaaatgcaaaagaaaggcgatcttgtatgaagcaaatctacacaacaacacttcggctgaatctggagaacgaagcagaccgcagggcgtgggagcatttgcagagccttgacaggcgagaatatcgttcagtcagcaaggcagtcgtttcggcggtcaacgcttactttgaccgtagcaagcagcttgccgatgatccctatctggaaacacgggagaaggaggacgctttcctcagccggatcgaggataccatctcacgcagcttgcagagctgtacgccggtaagccttggcggtatcctacagcttatgcagagcgcacagcctgccgctgctcttgtttcggaggaaaccgaggaggacatttcagctgcgctggattttgcagacggcttttgaaattacttttcttgattttactactatgttggtggcaatacaatccgtctttgctaccaaattggcaattctcagaatgaggaaaacaatttaccatcagttctgcagggagttggtatctgtgtgataccagttccctgctttttactatcacgaagccgcccagcggcagaaaggagccagatatggcaaataaaaagatcatgaccaaggaagaattgcaggccaagcaccgattggaggaggcacaaatgcgggatcgggcgaaagagcgaaaggcccgtaccagacgcttgattcaggagggcgctgttttggagaaagtatttccagaggctcagcaaatggagcttgaaaaattagaggacttgttatatgagaagctacactaatctgcgaggggcgttccgggcaaccggggcgtcccttccttttttatcccgaagggcgcacttactcaccacctgcgaagcaggcggtggtatcccttccgttggtcgggctcgtgcgctcttcacgaactgtccatcggacacttctccagagagggcaggaaatgccgcaagtcagcattccctgtgcagtcggcgcttctgctgatgcagagattgctgcttgtcgcaccaatccggcagatactctgcccgcctcctgcctgcgaaaacctgccaccggcagctttatcgcagatatgggcagcaatgcagcccattttctctttgcaaagagaaacagaaaccaaggggtggcgttttaccaccccctcacaaaatacgaatcgaggtgaacgcaaatggcaatttaccacttggaggcaaaggtggtcagccggggagccggacgctccgcctgtgcagcctccgcttatctcagctgctcccacatcctcaatgactatgacggagtacagcacgattacacccgaaagcaggggcttgtgtggcaggaggtattcctgccggacatggccccacccgcatggcaagaccgagaggttctctggaacgccgtggaggaaaacgagaaaaccaaggacagccgcttagcccgtgagtttgtggtagccctgcccatagagttgtccctagagcaatggcagacgctgttgacggacttcgtacaaaaccaatttgtcgcagacgggatgtgcgccgatctggcaatccacgatcctgatccaccgggtcataatccacatgcccacattctcttgacggtgcgcccgcttgatgaaagcggcaaatggcaatacaaaacggagaaggaatatctctgcagccgtgacggtgaggaacggggctttaccgctgccgagtttaaggctgcacaggctgacggatgggagaaacagtaccagtacaaggtaggcaggaagaaagtgtatatgacaccatccgcagctgaggaacatggatatgagcgtgccagcaagtatcccaaaagcaccaaatacgggagacagaatcccatttctgaacgctggaacagcgaggaacagctccttatctggcgcaaagcatgggcagatgtgacaaacaaatatttggagcgatacggtcatgaggagcgcatcgaccaccgcagctttgtcgagcgaggcattgacgagcagcccaccatccacgagggcgtgattgcccgtgctttggaacagaaaggtatcgtgtccgacaggtgcgaactcaaccgtcagatcaaggcggacaacaggctcctgcgggaactgaaggcgcagttcaagaaaattacggaggcggtgaagaacacgctgcccgctattgcagaagcgttggaaaagctgcgggaaaatatgctgatcttctgctatcagttagggcatatccgcagcagcaagaaacagatgaccggtgccttgaatattctgaagccaaatctggcacagtaccgctcccttgtgcagcagataaaggaaacaaccaaagaacggaagtccctactggctgaaaagaaatcccttcctgcgatccactttgtcaggcaccgtgagcttgcctccaaaatagccgagttgacggaaaagttagaggagctaaaaagcgaaaaggctatgctgcttcattctctggaatacccagaggacgccacaagcgatatcttccagcgccagattgaccgctatgaagataatctcaaacggcttgaggcgcaggagaataagtatgccggagagctggaggctgcattgtctgagtatgccgagctgaaagagcaagcttccggctttgattccttgcagctttatctggagcggaaggcacttcgacctgacagagagaaagcagcagcccaacgcattgaagcggcttatggcgacaagttcagttggtggttgatggagagtggcctacgggatgtgtctggctatcttgacgaatatgcacaggaaaagacaatggatcgagaactgcggcaaaggcggcgatcggagcggcttgagcgtaagatgaaaaacagagatatggaacgttaaaagtgctggaggttgaaacttcaggtgaagtctgtgacatagggggatggagataatccctatacgtcaagcgtaaaataagcaccggtatgggttttccataccggtgcttgcaatatttaatcgaattctatcacttaaaatcaaaagagttttccaacaacttatcaagtgctgccatcagttccgctcgaacagcctctctttcactttctccgcctgcattttcgatatagatggaatagttatcaaatgtgatataggcgtaatagatcacagtcttaattccttcgctgtttgcatttgtaacgaagtagccagctttaactggcgtatctccaaccatagatacatttcccttgccaattacggtagtatccataagattgttcccagacagcgaaacaacaaatttcatatcgctgtaatgaccatcaaagccaacaaatgctacatcgtccaaggtaaagagggcatctccggaaatcggaagatcaccgaaaatagtctgaacctcatctttggtcaatgctcgtgcttgcaagttcaaactcagagcagaggctaccgtatctgctttagtgaaagatatggtagttccatcacctaatgtagctgtttctgtacttttgccgaataatcccatactaaacactcccaccacgattagacagagacacgcagcaattgccccaaatttcagccaaatgcttttttgtttctttgcctgataactcgccgtttcttcgatatgacggctaccaatgccaccaacggcgtcagagatgttctttcgtgtcataaatcataccccgctttctgtaaatgatttttaagtttgcttctgattcgggaaaggcgaacagacacattgttatttgttgtacgaagcctctttgcaatttctgtaatgctatctgagtaccaataccttgctacaaacataaccctgctttcctgatccaagctgtcaaggaaacgatcaatttcctgtgacagctcctttgcatccacttcctgttcaatagtagatgcagaagttaggcactcttccaactcatcaagtgcaacatcatagtaactgtttcgctttagtgcagtatttgcgtggtattttgcggtagcgatattgcgggtaatacgaaaaatataggttctgagtgggtcaggtctttctggaggaattgcattccacgcagcaaggtatgtatcatttacacattcttctgcgtcgggttcgcatttcaaaatgttgtttgcaattcttttgcaagttgaaccgtattttgcagcaagttcagctattgcctgctcagtacgagcaaagaacagttcaatgatcttcacatcctctaacaaggtatccacctcctcacctatgtactatggatctggcggacaatcttacagaagcgagggaaaatttcacacctttattatagtacattgcaattctattttctatcgcctcagcaaaatcgtttggcaccagtcgaggtcgctcggcagtctgaaaatatggtccttcggttttggtagagttgctcgcagcagaggaggcgtaacaaaaaattaaaggtagctgcccggacagaatgggttgggtggaaaaataaataatatccgaaacaggatgacggaaattgttagcgccgagttaattcgtacacagttagtgtttaagtgtttacaaacagcccattgatattgttcgtttgtgcgtatataatatatataactatttgatgcggaggtaaactatgtttgaatacatgacagtacaggatgcggctaaactttggggaatatcggtgcgtcgtgttcaaaagctgtgtgaggagaatcgcattgatggaattgttcggctacctcgtgcatggctaattccccaagatgcccaaaagccggctgatggaagatataaacaaaataaaaatgaatttatagctgacaacaaggagaacacacgatgagtaaattgttattagtggaggatgaccaaagtatcgtatcctcattatcagactatttaggaaatgaagggttcaaaatcgaaaatgctcccggtcaaaaagaagcaatagaaaaattggatagcgaccaatacgatatagccttggtggacattcaattatcaaacggaaatggtttttctgtttgttctgcaattaaagaaagaggaactatgccagttattttcttaacggcttctgatgatgaatatagtgttgtggctgggttagatatgggggctgacgattatatcagcaaaccgttcagaccaagagaactgctttcaaggatcaacagcgtattaaggagaactaagaacacacaaaacattatcagttacctcgacttagttgtggacacaaatcaagcaaccgtatcaaagaatgggaaagagattttgttgtctgctatggaatataagttgctgttagtctttttgcgtaacaaaggtattgtcctttctcgcagaagattgttggagcttttatgggacactactggggagtttatcaatgataatacattgactgtctatatgaaaaggctacgtgacaaaattgaaaccaatccgcaggagccggaaatcataattaccgttcgtgggcttggctataaggtgggttgatatggactttatcagaaataaagaagttaaaaggcaaattgttgtcagcagtattcttattctattttggggcggcattggcattatcgttgatagcaaagctgtgtggattgttctgtcggctatcatttcatccagtgcagtttccctctttttcacatatcagagatacaagaaaattgctgattttagtttgcatattgataggctgttacatggagatgaaaaaatttcttttgggcagtttcaagaaggtgagttatctgttttacatgatgaaatatccaagatgacaagacggcttattgaacaggcagaagctctgaaaatggagaaaggtaatttggcaaatgctttagccgatatttcacatcaattaaaaacacctttgacatcgctgaatatcttaaatgcttctctgtgtaatgaggaactgactgacgaagaaaggtatgagctgatccgcgaacagactatgctcttatcaagaatggagtggctgatagccacacttctgaaaatatccaagctggatgcaggaacgattactctaaagccacaggcggtatacttaaaagatgtggtagaaaaagcaattcgtcctctggagattgcggcagaattaaaaatgcagacaatcacgcaagtgattccggcagaattaaaactatctcttgatactgattggactgctgaagccttggggaatgtaatcaaaaactgtatcgaacattcaccagagggcagcactatcgaaatcaaggcaatagaaagacctcttttgacacagatcattatagaggatagcggaacaggttttcaggaaaaagacatcccccatttatttgaccgattttatcaaggaagtggctctacaatcggtaatgccggtttggggttggctctggcaaagacgatcattgtcaatcagggtggtgtcatccaagcgaaaaatcgggagtcaggcggtgcaaaatttgaaatctgcttttatcgggggactgcttaatgcagcccctttttaagtgacatttttgtaatgaaaaagtaatgaagcagtcacttggctttgctatactgaattgcaaaaatatatggaggaactttttatggagatattaagagtagagaatatctgcaaaacctatgaaatggacaatgctcctgtccatgctttgtcagatgtttctttttccgtcgataaaggagagtttgttgcaatcattggagcatctgggtctggcaagtctaccctgttgcacattttaggtggtgttgacagaccgacttcgggaaaagtatttgtggatggacaggatgtttatgagcaaaatgaagatgaattggctgtattcagaagaaggcaggttgggcttgtctatcagttttataatctgatcccggttttgactgtcgaggaaaatatcacgctgccgattcgattggatgggcgtaaaatcaatcaggagcgtttgaaagaactgctatccacactcaaactggtaaagcgtagaaagcacctgccaagtcagttatccggcggtcaacaacaaagagtggcaatcggacgagcgttgattaacgcacctgcgattatccttgcggatgagccaacgggaaatctggacacggagaacacaagggatattatgaaacttctgcgtgaatccaatgaagtctatcgccagacaatgatcctgattacccatgaccgtgaaatcgcaatgcaggcagaccgtattctggaaattcaggatggcagacttgtgagggatgaggtgatacgctgatgaatatgattttcatgcttacactcaggaatctgttgtcgaataaaaagcgtaccctactcacacttttaaccattcttttgtcaatcagtatgataaccgctattctctgtgggggatggtcgttggttgattttttgaaagagaaagaaaaagtgtatggtggcgattatgactactacatggaggatttgacttgggagcaggttcaagagctatatagtcaaaacaatgtaggcgaagtttcgcttctccgctttgccggaaacagtttttacggggagaaatccaacagtacaatgctctccgttggcgagattgacgagaactttacccaaagattttcgttaaatcagtatttgcttgcagggcgtttcccgcaagatgaaaatgagattgttatttcagaatcttttttgaagaaaaacaacatgaatacagagattggagatacgatttctttaactcttggttcaagaatttgggatgaatataatgcccagctttccgggctgacaaattataggggcgaagaagaaagcttcgttccaacaaaagagaaagcgtatgtagttgttggtattctgtcagatgtgaatgactcaaaaatcgcagcaaactataatgcctttgcaggtgttgacaaaacggcatccgattttgctgcgtatgtcaaggcaaagaatttatccaattcgatctatacagaagccgaagaagtggctgcggcagtagacagtcatgtagcaaagtttcattcggaattgttagtctatcatggaattaccgggggtaaaggagctgcaaaactgattgctttggtggtcatggtcgtttgtcttttgatggctgcatctgcttcaatgatcagcaacgccctctccatttccttacaggaacgaattaagcagatgggaatgctatccagtattggagccacaaaagggcaaaaacgccttagcgtatatttagaagccttccttttgggagtggtgagcataccctttggattggttgttggtatcctgctatctgctctgttattaagtgtggtcagggcagcttttggagaaacattcacttttggcatcgtagaactgtccttgaaggtaaacggattgatcctgctcgtcagcggattatccggcattgcttctttgtacttcggaagtagaaagcctgtgaagcaagcagctaaaattacagttattgaagcgatccgccagtctaacaatgcggtatcaagaaagaaattccgtgacggaaaaatcgtttctttggtttttggcatttatggttcgttagcagcaaaaaatattaagcgtaatccaaaacgcttccgagcgattaccggctctattttcttgtcggtggtaattgccctttccttatatagtttctctgattttatgctttatcagacatccttggatatgaaggaggacggttcctgttatactgatgtgatttcgatgattcaatacaaagatattcctgtcgcaatcggggcattatcggatgaaaatatcactgcggatgtttcctattcttttcagcgatatatgaccgctgaattttcgcaggaacaaatcaatcctgatatgcaaggatattttatcaatggtacgaaagcagaggtatatgtcgtaggattggacgaagaacattttgtctctttttgcgatgaaaatggattcagtctggatgtgacaaatttcaatcatggaattttgctcaatcagactatgggatactataattcggcacaaaatcgggtaattgcaggctcaccgtttcttattgaaccgggaacagaaatcattccgctgggggcatccgaggatgccttgccgattatcgtggaagaaatcgtttcagaagaaaatgcaaatatccaatccatgtttgtgagagatcgagctgtcctcatcgtgcctttaagttattttaacttgctgatagatgataacgcctatgtggaaatgagaatacagacagcacagcataaagaagcaatggaatgtctggctgacagaggatttccgcaaactgtggacattgcagccgcaacgaataattccagacaggtatatacgattgcaaaactggtaatctgcctgttctcgatcctgatgacggttattatcagcttgaatgtttgtaacactatctcgaatacgattcatttgagaagaagcgaatttgctgttctgcgttctgttggtatgactgccaaaggattaaaatgtacgctattgctcgaagctgttttgtacggcgtaaaagcattggttcttgcgttgcctgtgagctttttgattcattgtgctatctactacttcatatcgtcgggtatgacaccatttgctttttatatgaacggcggtatttatgctcttgcagttatggctgtcggcgctatggtatgtatcgctatgctgtttgctgttagaagcgtatcaaaggtggaaattgtagaggaactgaaattgagcaatatgtaatcattcaatctaacaaagcaactgaaacagaggtaatagaaattgcgtaaaaagaaactggtaaagagagttgcaggcattgctttgactgttggtgcagttatacttgccattgtatgtgttggtaaagtaaatcgcattcagaacgaaaaagatattattggcacatggaaggatgcaaatgctgaggagatatttacctttcaagaaaacggggaacttgctgtgagtaaagatatgcccgattcgggtctatcctgcggtgacgcatattatagtttttcttactcggatataatctgtgttacacagggaaatagtagtgtagaatttgagatagaagtagatcaaaacgaattgaaaatcttcttcatgggacaagaatatctggaattggaaaagtaatgattacaaataaaagaaaaccattgagccgataattcgcatcctttgcggactaacggctctgcatatattttgaacgctattttcagaaacattgtgttttgcagaaaagccccttgacaaattccatctcagaaaaaatatcttgaagattatgcccgtaggaatggctttgagaatatccgccattttactgacgatggtttttcgggtgtgaatttcaatcgccccggctttcaagcgttgataaaagaagttgaagcaggcaatgtcggaacattgattgttaaggatatgagccgattagggcgaaactatctgcaagtcggattttatacggaaattctgtttccgcagaaagatgtccgttttcttgcaatcaataacagcattgacagcaacaatgcttcggataatgattttgctccgtttttgaatattatgaacgaattttatgccaaagacacgagcaataaaatcaaggctgtgtttgacgcacgaatgaaagacggaaagcgttgtagcggttcaatcccttatgggtataaccgattgccgagcgataagcagacgcttgttgttgaccctgtggcttctgaggtggtaaagcgtatctttctgcttgccaatgagggcaaaagtccacgagccatagcggaaatactgaccgaagaaaaggctttaattcctgccgcatatgcaaaggaatatcaccccgaacagtacaacgggattaagtttgcagacccttatatttggggcatatctgccattagaacgattttaagcaggcaagaataccttgggcatactgttttgagaaagtcggtcagcaccaatttcaaactgcataagagaaagactaccgatgaagatgagcagtatgtgttttataacacccacgagcctatcatatcgcaggaactttgggactgcgttcagaagcgaaagaaacgagtgaacagagctgcggcaagaggtacacatacaaaccgattaagcggctatctatattgtgccgactgtggcaggagaatgactttgcaaacgcattacagcaagaaagacggttctgttcagtattcttaccgttgcggcgggtatgcaagcagggttaattcctgtacttcccatacgattagtgctgataatgttgaagccttgatattatcggcggtcaaacgcttttcaaaattcgttctgaatgacgaaaaagcctttgctttggaactacaatctttatggaaaggcaagcaagaggaaaagccgaagcacaatcaatcggagttaaaacgctgtcagaaacgctatgacgaactctctacgctcattcgtggcttgtatgaaaatcttatatcgggattactgcccgaaagacaatacaagcaactgatgaagcagtatgacgatgagcaggcggagctggaaatgaaaatggaagcgatgagaaaagagctttccgaagaaaaggacagcactatggatattcagcattttgtttcgctgatacgaaagtataaaaatcctacggaagtttccgatttgatgtttgccgaactcattgataagattgtggtgtatgaagccgagggtgtgggaaaagcaagaacgcaaaaggttgatatttatttcaattatgtcgggcaggtcgatattgcctacaccgagaaagaacttgccgagataaaagagcaggaagaacaggaagaaaagaagcgattggagaaacagcgtcagcgtgaaaaagcctatcgagagaagcgaaaagcgaaaaagctcgctgaaaatggtggtgaaatcataaaaaagaaaatatgccctcattgtgggaaagagtttaccactacaagcaatcgacaggtattctgttcaaaggattgttgctatcaagcaaggcaggataaaacgaaagccgacagagaagcggaaaaaggtaatcactattatcgtcagcgtgtatgtgctgtgtgtggcagtacctactggcctacacacagtcagcagaaattctgctcagcggaatgtaaaaaggtaaaccacaataagaaaaccttggagttttactacaagaagcaaaaggagaaagaactatgcaaagatttattacagacgaaagaacaggtatccgatacgaactcatcggagattactattatccctgcctgacagtagaggaaagttctcccctttcaaaatacgggcggttaaggaaacgctatttgagagaacacaagcgagttttatattacactctgctgacaagcggaaagttatatgaacaccttgcggaaattgatacttcggctcgtgatatggcagagtatctgataaaggaaatggcaagaaagcaaggtgtaacagaagagctgaaagcaagggatatgctccgctgggttggaaagatgaataacattcgagcctgtgcagacgagattgtattgaatgacattgtgtatttctaacggagtagcaaccgaaagaaaactgctgtcagtcgatggcagtttttctttttcggcaagtattcaagaagtcattaagttgtgagtatagtcgaagtggtagaaaaattcgtaaagatgtggtataatgcttttgtttgtgagcgacaaatcgaaagttatggaggtactttatgaacgagagagaaaaaattatccgattatggtttgatatgtggattaagaaagcagatttaggaattgacaatatttttacagatgatgttgtatatactgagagttggagtcctaaatatgaaaaccgcaaaacggtaaagcactggtttgacgaatggaatacacgcggaagtgttcttgtctgggagattaagcaattttttcatcaaggcaatcaaacaatcgtggagtggtattttaaaagcaaaatgaataatggaaatgttgaagaatttgacggaatatctttaattgtatggacacaggataacaaaataaaatcattaaaagagtttggttgcaatcttcataattacaatccatatcgagatagtgatattcccgtatttcgagaagaaaaagcaaattggttttgagaggactataaattccagtttatcagtatcaaaaatagaatatgaacaacaaaaaacatcgtagtaatacggtgttttttgttacccaaaacccacaattcaatacataaccacaggttagtgcaaataccttatgtgattttttgaaaggcttagaaagggatatttaccccgtttttcgccccgaaaaacgacataaacaaagcttaatgtatcttccctgtggtttttctattttcggcaggaaaggagaattgattgctatgccgagaatgagtaagaagcggaaacaagagtgggcattgtttctgaatgaccgaaaccgcattatctacaacgagctttgcagaaaatgcaggaatgactgtaagcagagtttccgctgtattgtagtgctttgcccgaaatatttatcgaaaaggagaacaaataaaaatgattgaaaatgaaatgactgtcagcgtacctcttgaagttgtcaaggcaagcgaaatcgagccgaaagaagtgaaatggctgtggtatccgtatattccgtttggcaaggttacgctgttgcagggcgatccgggcgatggaaaaagcaagctaatgctttccgttgccgccctgctctcaaagggcgaacctctgccctttaccgaaacggaagaaaacgagcctgtgactatcatctatcagacaacggaagatgacgcagacgatacggtagtacctcgctttaactctgccggtggcaacggagagaaccttatcttcatcagggaagatgaaaagtctttgtcctttggggataaccgtattcgtgaagcgattgagatgtaccacgcaaaacttttaattcttgacccgatgagttcctatatcggagaaatctgttcgatgaacaatgccaacgaaacacgagccgagtttaatcatctgatagcggttgcgaaagatactggctgtgcgattgtgattatcgctcatatgaacaagatgaaagacaccaaccccctttaccgtaccaatggttcgattgacattgcgggtgctgcaagaagtattcttgcaatcacacgcacaccgaacaaggaagtacctgcggaaagatatttggtgcaggtaaaatccaaccttgccccgacaggctctgccattctgtttgaagtatctgagaaaggtgtggacttcatttccgaaatggaaatgacagcagaagaagcgttccagtcccttgcccctaaaatgggcagaccgaacgaaaaggaaatcaaggcgaaagaatttcttttggaaattctgaaagacggagaaatgctttcttcggattgcgaagaaagacttgaagccgcagggttcaagaaatcgaccatcaaaaaggcaaagaagaaagcaggagttatctccaaaaagaaaggctttctgtggtactggtctttgccgatgggcgatataccgagagaataaatgcaggctgtctgatgggaggacagtctgtttttatgatggaggtatcaaaaggaggtcaagggggaactcccttgcccacgacatctttgcagacgaagtctgaaagtgtcatagtgggttacacacattcaaagaatgttgtgtaatggcttcgcccctgccgagaaaggagagcaaaatgacaaaaaccgacaaggcggatatgagttgtgcaagggtaaaacagtacaccgcttctgatgtgagcaaggcggaaaggcacaacgaacgcaagaatgaaacctatgaaaatatgaatgtcattgaggaacgcataccatttaatgtgcatttcaaaacaccgactgccccgacttatatggaacaattaaagcagatggaaactgacggtttggtgtcgcttcgtgggttgaggaaagacgcaacgctcttcaatgaaattgtgattgatgtgaacacgatgtacttcgagcgtaacggcggctacgaatacgcaaagcagttttatgaagaagcgttccatttcatcgaagaaaaattcggtgctgaaaatgtaatatcggcagtaatgcacgctgatgaaatcaatatagcggcaaccgaggaacttgggaaagaggtgtaccactatcatcttcacgctatggttctgcctgtggtggagaaagaaatcctatggagcaagcgttgcaaagatgaaaaactgcgaggaacggttaaggaagttgttcatcaaatcagccattcaaagaaatggaaatcggatattccgctgaccgacgaaaaaggcaatccgcttctcagaaagaacggaaaaccgatgttccgagcttcatacagtattctgcaagatgaattgtttaaccatatgacggagcaaggcttcaaaggctttcagcgtggcgaatacggaagtacagcagaacacctgacttccctgcaatatcaaatcaagcaggacaaggaacgcttggagaagttgcagaagcgcattcagcatgaacagataaaatatgagcctgcccgtaatgtttctaaaacctataacgagattgaccgtatggggcagaaaacaatcacaggtaaaatggcaatctccaaagaggattattctgagcttactgcccttgccaaagagggcatgaccagtcgtgcggaaatcagcaaattagaacaaagtgccaactactaccgacagaaatattttgactgtgcaaacgcactcgaaagaatgaaaactaaatacaacgagctgaaagaaaagtgcagaccttttcttcaagcgttggagcatttccccgaagttgctaaactttttaccgaaaaagtgaagcagcttttttcttttaaggaagcacaggaacgagccgaaaaagaagcaagggaaaaagaaagacaagagcgtatcaaggctcgaaggaacaagcgtgatatggaaagataaccttttccattatactcacgacttaatgacttgttgatatattgaaaatctgcggttgatgggcgttctaatatgaatgccccacaatcaaatcttatgaaagagaggaacggactatatgaaagaacagaaacattcttattcacaacgcattggaaagacaacatttatcgtaaatgtaaagcaatccgaaagtgccaaaaagcctttgaatacggtgtttcaagacatctgtaagcacgaggttttgggcggcttctttacggacaaatcgtttaatttagaaaatccacaaaaagtgtcttgacaaactcgaccccgaaggaacgggctatcgtgcgaaaacacggtttgcccgtttttttaatcttccagagctgatctccatttttaaggaagctgcggatattcagacatcggatatgctgaatcttcctgtaccggaagcagagtttatcaatgaagtcttaaaaccaagtgaagaacagcaggaaatggtcagtgccttttcggaacgtgcggaagaagtaagagccggtcttgtgaatccaacggtggacaacatgctcaagattaccaatgacggaagaaaatgtgcattggatcagaggctattaaatgaactccttccggatgcagaaaaaagcaaggtcaatacctgtgtggaaaatgcttttcaggtatgggacgagggaaaagcagatcggacaacacagctgatcttctgtgacttgtctactccaaaaggggatgggactttcaatgtatatgatgatgtccgaaacaaactggttgccaggggaatcccgaaagaagagattgcgtttatccatgaatacaacacggagacaaagaaagcagatttgtttgcaaaggtacgggccgggcaggtgagaatccttatgggttccactccaaaactcggtgctggtaccaacgtacaggacaggctcattgccctccatcaccttgactgtccgtggaagccgtctgatctggaacagcaggaaggacgtattttaagacagggaaaccagaatgacaaagtaaagatattccggtatgtgacggagaacacttttgatgcgtatatgtggcagattttggagaataagcagaagttcatcagccagatcatgaccagtaaatcaccagtcagggcttgtgaagatgtggatgatacggcactgtcctatgcggaaataaaggcacttgccacaggcaatccgtacattaaagaaaaaatggatctggatgtgcaggtgagtaagctgaaactcttaaaggcaaaccataccagtcagatttaccgtctggaatccgatattgcaaagaatttcccggtacagatcagtgcattgaaagagcggattgccgggatgcaggtggattcgcaggtagtaaaaagcgtggatttacaggataatgacacgtttgccatgacggtagggaatgttctttatgaagataagaaagaagcaggcgaagcgttgattgccgcctgtgcagggttaaaaaccgtcagcaccggcggaaaagttggggaatatcatgggtttacgttatctgcttcctacaatatgttttccaatgcgtttgaactgacgatcaaaggaaaatgctcttataagctggagattggaaaagacccggtaggaaatatgcagcgtatccataacaccctttcttctatcgacaggaagctgacggaaagtgagcagaaattggaaactgtacaacagcagcttgctactgcacaggaagaggtaaagaagccattcccgaaagaagcagagctgaatgaaaagatggaacgattatccgagttaaatgccctgctgaacatggatgaaaagggtaatgagacgattatggcagatgaggatattggcagagaaggaagcagcacagacagcagggatgccgtagaagaaaaagaacttccggaaacagcagacagaatccataagccgtctattctggaacgcttaaaacaggagaaggcacagcagaatacagcggaaccgaccgttacacagaaagctgcaaagaaaaaacacgaacaggagttataaaagatgtcccgtcagagttttctctggcgggacataaaatggagggtttgtttatggcaaataatatagaaaaacagttaaaagaaatatcggaacggctggagcagggagtaaaagaaatctttacttcggagagatataccgaatatctgaataccatgtcaaagttccacaattacagctttaataacacgctgctgatcaccatgcagaaaccggaagcaacactggtggccgggtatcatgcatggcagaagaaatttaaccgtcatgtaaaacgtggagagaaaggaatccagatcatcgcaccagcaccgatacgggagaaacaggagattgaaaagatcgacccggtaacaaaagagcctgtgatcggggatgatggacagccggaaacagagatcgtggagatggtgataccgagattccgtgtaacgacagtgtttgatgtcagccagacagagggggaaccgatcgcagaactggaggtgccggagcttaccggaagtgtacagttttatgatacgttcatgcaggcattgcagaatatttctcctgtgccgatccgtatgatgaatgtggaaggggatgcaaaaggctattatcaccagacagaaaaatatattgcgataaaggaagatatgagtaatgtacagacgatgaaaaccggagtccatgaggtgagccacgcattgctgcatgaccgggaagtaatggatgcggaaggagtcttaaaagaccagacaacaaaggaagtggaagcagaaagtattgcttatattgtctgcaaccattttggtctggatacttcagaatattcgtttacctatatcgccagctggtgcgagagcagggatatgaaggcgttgaaagcatctatggataccatccgaaaaacatcggcagagatcattgagaatatcgaggcacagatgtacgagttggaaatggaaagaccaatccgggataccttccataaggaagatttgattctgcatctttcgggcagcatgggttccgagtttacttatgatctgatcgaaaatatgagcagggaacagttagaacagaatgtgggtgaatacgtccgccttctggaaagtggtgagatagaggaaaatgagaaaccactggaaagttttctggaagaaaaaggtgctgccgtcacaccactctatgacagcagtgggcacggagagaactatccgattgatttttatgatgtggaatatgatgctgacacaggcgttacttatttttctgacctttctccgaaagagcaggcagagatgttggtgcataaagcagagtttccaagaaatattttttcagaagaagaaaaggcatttgtaaatgaatatgcagaaactttccccggacgggtggaaagactgaatgacctggtatgggacatgagggaatcttacgatgaagccggttcaaagctagtgtatgaagtaatccaggcagcaagggcaaacttcccagtgaaagaaccggagattgtagaagaaacagccatgcagtatgctcaccgtctgattgaaacggcagaagctgcaaatacaggaaatttcacagattcccagagaaatcttattgtgaattttgcatataagatggatgacaaagacgaagtgcttggactggtgaaccgtatgatgaccgcaatccgcagaccgggaagtgaatatacgagaagccttatgaatgaaacacaggcacagattgacaatttcccggatggcatgatcggttttacggaaatgcacgaggcaggaattcagttagaccatatgctcccgcttacgaaagaccgggcatatgaactgtaccgtggaggggcagaaatttatatcttacacggaaatccagagaatccacaacgggcagaacagatgcttgtggagacggaaagtgagatccttggatatgacggtatctttggaatcacagaaacagaatgggaagtgcagaaagagagagaaatatctgctacaaaacaggaagcactggtacagcagagtgcagaaaagattgatgagacacttcttctgcatggagaaagcagaaggtttgccatttatcagatggataccggagatgagcatacttatcagtttatgggaatggaatccgcaaagagtctgggctataccattgacggaaaggattacaggatggtttatgcagcaccgtggatgccaacgatcacgttagacaatatatttgaacgctttaacattgaccgaccggaagatttccgtggccattccttatcggtaagtgatgtgatcgtgataaacaggggtgcagagatcacagcctattatgtagattcttttggatttcaggaacttccggagtttgtccagcagagaatgaacatgctggaacataattccgtcagggcatatccgccagtttataaaggaacattggaacaggcaatgggagaacgggatgtggatgcttatctggattccagaaagttaaacctggactgtaagaaagcaatcgaagaagccatccgggagaattttgacgggctgcacttaaagcaggatgcggcaaaagaagtcgtggaacgcttcggggaagaacgtatgaattttgttatggcaaataccatccgtgaactttcccatgatggaagattttccagacagaacaaagactgggcggagcatatcgaagtcccggaaaatgtcagccggggtagaaatctaaacctggattatgtgatcgaaagccacccggcagttttagatgggtttatcgacatggcaagagctgagatccggatgcagaggatagaacaggcgataggagaaaacgaagtgacaatcacggcagagacaagaggatatgaagcagaaggacataacgggacatggcatacggttgatgaaaaggaatatgcgggggagaagttcttcttaatggaacatgatgaatttggctccgatgtggcagggattatcgtagcagaaaatggacagcttgtagcggaggatttatggaatgggtttgatgcaggagcgttagaagctgtatcagaatatttgcaggaaaatggaacaacactttatgacttgacggaattcccgaaagattctgttgtaaccctgcggagtggacagacacttacaatcgaagaaatacaggcagtacagaaagatacctgggaagaaacgatggcaggaaaaaatgaatctggaacggatgtccggtttaatttccatgcagtcagtgaggtgcagctgccagaaggcataaagttgaaaatgccagagattcattacgttgataatttttatgtgatggaagatgtaaatgcagagggtgtagtaaaagtaaaccggtatgaatcactggatgaagcgatgcaggaatatttacgcctgccaaatcatcaggaaaaagtgcttggtatccagaatacggaaacaatgcaggaaagcatggattttatccgatgtgaaaacggaatagatcagctgacccatgcatatgaacagatcggagggtggctgaatccggaaatatatgaagcggtaaataaaatggaaaatatgctggactggaatgaggtacagattgcatatcagattggaaaacaatactttacaatccagactgctgaagatggctatgattatacattttacaatgaagattatcaggaggatgatggaggaatctatgacaatccgacaatttatgtagatgaagctgccagtgatattttggaagataaagggtactcattggaagacgcaaaagtagtggattatgaagaactgatggcagatgtggaagaagttcaggaagaacagatgcagcggatacaattagaaaaaaactgcccagcaagtatttttgaaggatttcgcagggaagaagcaatgcaaacctatgaaggaatcgcaatgcagtttatcaggagtaaagggtatctgaccatacaggcaacagaagaaggatattcgtttattttttatgactctgatctgcatgaaatccagagtggtgattacgataatccagacgcatccattcaggaagctgcttatgaaatccttaaaagtgaaagaatggatgacctggaatgtgtcaaagtggattataaagaatttgaagaaatgacgatccagcactctaaggatttattgcaggagggggaacttcgtgcgacttctgagattggaagaaatgaactggcattaaatagcttgagcagggcagaagttgaaagaggtgtcctgtatcatgcacaggcagtattagaagatatgggaatggaacaggaggtagagctgcttgctgcaagagtgtatggttccagaagcagacaagacctctaccgggaagattctgaccttgatgtggttctttcctataaaggtgatattcgagaagatagctttttcaatgccttaaatgaatctggtatagcgatggcaggaattaaggtggatattaacccgattgcagaggagcgaatcactctggcagagtatataaaagaatccgaaaaatatcttgaccagcaggagattaaaaagctcgctgtggacctggataattttagctatgacgttgatacctatgagtataacgatacagttgaaaatagagaagaacaggtggaaaaactcacggaggatattttgaataagaaaacagaaactatcaaggactggctgcttgaggtatccgaggaatccgatatagacagcgatgttataactgcccgttctttactttcccgtctggaagatacagagcgattttctatttttgacaaacagccggagcaggaacagccagaagccacgatcagtttttatgtcgcagagtgcatggagtttccggtcatgggagagtaccataacaacctcactttagaagaagccattaaaatatatgagagtatcccagcagagagactgcatgggattaaaggaatcggatttgatctgcaagatggtgatgaaaattattccggagaatatgagttgatgagtgcagaccggatacggcgtgatctgatagatatgattccacactataaagaaagccctctggtgcagaaagcaatcgcagacatggaaaagtatctggatgaaaagcatggaagggtaaaggaaacggaatatacgacagaaacagtaataggaagtggacagaaaccttctgcggttgcggcagacagaagggcagagcaggaaccggtatctgtaaatcggagccagccacaaaaggcagaacctgcaagcagagcaaaaggtgaagtgaagaaatctgtgctgcagtctttaaaagattttcaggcaagggcaaaagcacaggagcagaataagacaacggagaaatccaagacacataagaagggagaagtggaattatgatggatttggcgatgaactttgatgcggatgaatgtttagtaacagcaatgtttgataaaggaaacagaaatgacacgatggaggcaatcgatcatatcattccttttctgaaaggcgatgcagatatgatcgggcttgtctgcaataccataagaaaactgttctgtatgagcgatgaaggatatgaagtttttcttatggatctggaagaatataaaatggaactggaagaggaggacgaagaatgagtacaagtcagtgtgcagtatatcaggtaaaagataccccagagtaccgggatgtgcgtttccgttcttacgagaaactgaaaagcgaaggaagaacagtccagatagaaaactatcagcaggtgtacattggaagaatccagccgggggaaactccggctgatattaaactccgtttacagaagcaacgaccgaagaacttcaaaggtcattccatcggttgcagcgatgtgatcatcattaccgatgatggaaaaaccacagcttactatgtcaacaaagatggttttatcatcattccggaatttctcacaatcaaaagttcttccgataccagactttccattgatacgatcgggtacgaaatcgaaggaaagaaagggacatggcttgcacaggattatatcctgatgaacgaaaagaaatggtttctgatggaacatgaggagtatgggacaagagcagcctatgtgattctcagtgaagaaggtaccgtagttatgaatgactgttacaacggctttgatgaagaagccagacggaacatccagaatttcatgcagcaacaggcagagcaggcacagcaaaaacaacaggaaatgcaggcacaagcccagaccggacagacacaatctggagaaacacaaaagaagaaaccagagctggcaaactggcagaaggttatggataatggagaatatcttcgcagtgcagagatggcagaagaagccaactataatatgattgacggactgatgaataacactccaaagaaaaaggataagaacgctccacggagatcggtacttaaacggctccgaaatcatcagaagaagatagccagtcaagggaaaggacagccacagcaacagaaggcgatggaagaagagatggaaaggaagaagaagtaaaaaagtcttgccggaatttttgagggcaatatataaaaaatggttgattttttctctcaaatatcatatcataacactaacaggactccccgcacctctcacgcaagtgatgtgtcccatggggagacatttttatttttggagaaataatggtgaatacaagtgaaactaaaaatgaaaagttgcaaaataatgaagcaactgtacaggtaatgaaacaaccgaaaacctttgctcaacaagtcgaaattattaaagaaaagggttttattatagataatgatacagaatgtatcggatttttaaaacaggcgaattattatagattatctgcttatttccttccgtttagaaaaaaggatgggacgtatttttcaaatataaactttcacagaattcaaagaatctatgaatttgacagtagattgcgtggtgtattatttaattatatagaaaaagttgaattatatttaagaacgcaattagcctattacagtggacatgttcatggggctttaggatatatggatggggctatttacaatgacaggcacaatcatgaaaagttcgtgaaactgttaaatgtatgtatagaggaaaataaaagtacatcagtagttcagcaccataaagaaaagtatggcggaaattttcctatatgggttattgttgaatttttttcaatgggaatgttgtcctacttttatgcggatttgcagtctggtgaccagaaatatttagcaaaagaattatatggtacatcagtggcctgtttaaaaagctggttacgttgcatcactgatttaagaaaccgttgtgcacattattcaaggctgtattattggtcatttcccgcattacccaaaatgccaagggaattagaaatgtcaccaaacagaaaattgttttcacaaatacttgtattaaaattattatatccaaataaaaaagaatggatcaacaaagtcttgatagaattaaaagctattgtagaagaatatgagaatgatatatcattgagacatatagggtttccagaagattggtatgagcagttagaaaaatagagatatatttttagggacagaggaacaatctgtcccttttaatgtgtctctataaatttggctcttttctatcatgtagttgctcgtaattcttcttaagaatcatatcaatattagcagacacagtgcgaagttcccgttcataatcccggtgattaaaaaaatcttcacgctgtctattcctcaattcaacaagccggtccttttcagcatatagagctttcatggaaggcaatttattcccgccagatttttctttgagtgttcggagagctgtgtcatacagggaaagttctgcctggtgttcttcataaaatttctccttgtttcggcttttgcgataatctgcgtacacatttttatatgccagatattgtccggtaaaatgaatctgctcattcatatctttaagttgctgttcagtatcttttaaagattttctggaagcactggtctggtctgatgcttgatcgagtgttgcatggaaatcatcaagagaatcatagccatgttcctgtatgtaggcaacagtctgagccatctgctttaaattggtgagctttactttttgagcataggcttcgctctgctgtgctttaatacaggtttgcagatctatgacaagccggagatctgattttatgaaaatgaatggtgcagggatagcagaagtatcggagaaaggaacagttggcgaatctgtggaagtattcggagtttgctgttccagaatttcttctttctgttctttatgggattttgtgttttcctcaaatgttttcaagagaaaatcttctgtgtatctggttccaagatttcttccagtgatatatttttttctgccagggtgaagatagctgtaccggtttcgactgattttgaagataatgtgatatttttcatcaaggatttttgaaaattcttctggtgatcgggcggtacttgcagcatcatcaatagcgtcacgaagaaattgtttctctgtctggtaacgagttccctttggagtgattccatcttctttcattttctgatttaacttatcgagtttttcctgtccccggcgttgtgcccaatattctttttctgtgatttttctttcagcaggagtgagcagatcaacctgatgtagtccttcttttttacacatatccataacttcctgttttaaatggataaggtatgctgtgcttagatggtgcttgtatccggcttttgcttcacagtcaaattccatatagggttcttgtggtatgtcatatttacggagactgttgattacgatgtgtacatggatatttccactttcgttatgaccatcggtatgagtgcagactaaagcctgatgaccaggaaagtttttctttgcaaaagtcaatccgagttgctgggcacgttcaccggtcaatccacattcatctctgtctttcgggtcgaagctaatgatatagtgatgggattttatctcattgaagtttttgttcttgtggtagtagctgttcagttcctgacattccgatgcaaaagtgaatggatcacagttcagaccgtccagataacattcttctctcaatatcatatgcccttcttcatcaagaatcggttttcgggtatactcgttgtgttggaagataagataccgttccgattctccatagtcagagtttttgcttgcgatatgtttaattactgccacggaaatcacctgccattttcatcacttcatacttcatttcataaatatcccgaagggactttctgatttcatttttcatttcagtggagataattccaccctggttaaaataccgggcaatctgatttaagttgctgccaatcttaccaaactcgctaataagtttttttatttcggggacatctgcggtaatttcgtatttgatgatgactttctggttgtccagggcacttcggacaaaatcagaaaccgtcatgcggttagccttggctctttctgcaagaagatcatattcagtttcattcatgcgtaaatgcacatctttagtttttgcaagagtttcctctttcttaggtcttgtcattgataacttcctttcttacgtggtagtggtttcataagaaaatccaaatttcgtagcctgctgggaaagtgagtgatgaaaaattatcgcactgtgaccatgtaaatggaaaccaatacacatatctgtgattgtgggcgagggtatggggaaacgaaatccccatcaagttgcaagtggtcaatagcccggaaagggttattgtgctacgttgcgaaacttgctctggaagagtggcatctaatataaagccaaatcggatggaaatttgagaacaatttaaaatataaaaaaacggaaatcttatcccgaattaggctggaataattagaaagcatattgatagttcggaaaaatgatgatataataaagtaagttgcgactaactaaaagagccgaggcatgattatgtcaacagttagtctataaataattgaagaaaggaatttgcatatatatattttatacataggctagaaaaaactaattaaaattagctgcttcgaacatgctgattgttaatatgaaagattattgaataaggagtgccgatgaacattaaattagtaaaaaattataatcaaatacgtccagatagggctacgttattttgttttccctttgctggaggaggagcgtctgcatacaactcttgggttcaaaaaatgaaagacaaagtaaccgtttgtccgattcaacttccaggaagggaagagaggattatggagaagccatataacaatatgacagatatgctggatgaattggaagaaactatatggaaatgcatacggggaccatatgcattttggggacacagtatgggcggaaagattgcctatgagttagaaaaaagactggaaaagagaggaaagacagcccaatgttttttggtgtccggaagccgtatcccaagtatcccagaacgaaatccaatctatcatcttcctgacgatgaatttaaaaaagcgctcggaagattcgaagggacaccaaaggaaatactggagaatcaggaacttctggatttctttttgcctatgctgcgggctgattttacgatggacgaaacctatcatgataagaaacttactgtcttgcaaagcccgattgaagcatttggaggacggaaagaccgcgaagcagatgaagaagcgatgaaagagtggagaaaatatacaaagagggctttccactgccatatgtttgaaggtgggcatttttacatccgggaacaggaagaagatgtcctgtcagaagtacagaaatgccttctgggtgttccagatgaaaattgaatcatacggaaaccgggaacttatgcatatgggaaagctggaactgcatacaggggaggtacacatctggaaactccgatggagagaactggaaacattttgggagtggcataagcctcttttggaaaaggaagaataccagaaagtgaaacattatcatttttatgaagatcagatgcgttaccttacaggaaagattgctgtgagaatgttattgaaagaatattcaggcgtggacaagattgttttgagaaaaggaaaatacgggaaactgtactggaaagcgccgcctggacaaaaggaaatcacatttaacctttcgcattctggagaatgggtactgacaatatttgcttgccaacaggctgtgggaatcgatgtgcagaaaataggagaaattcctgaatatatggaaattgccgaaaagttttttgcaacagaagaagcggcggaaatccgggaagcgggaaattccgaacggttctatcattactgggcagcaaaagaggcatatctcaaagcgttgggaatcggcttaaatcggggaatgggcttcttttctgtcagggggaacaggattatagaaaatggaaaagtaaaatctggatggaaattatatccgattctgataaaagattatgccgcatatgcggcggtacaggagaaaggaaggtaatacaaaatggcaggctacaaaaagaatatggcacaatatgaaaatctagaaggctgggaaaagttaagcctaggaatgcaacttgataaatgggcaatacgatatggaaacaggatagcggtcacagacagcgaggaggaaattacctattcggaattgaatcagaaagcaatcggtacaggccaatattttatggagaaggggattcaaaaaggagataaagttctggtgcagttaccgaaccggatttcatttgtcgtggttctctttgctcttgcaaagattggggcagtaccgattatgatgttgccagcccacagagaaacagaattagaaggaatcatagcgcttgcaaagccgtcagcatacattgtagctgaaagatacctgggtttttattatgtggaaatggcaatggctatgcagaaaaaattcccgtgcatacaaaatgtttttgtagatggaacgcaaaggggagcatggtatgaggcggaaacagagagacagggagtatttccggaagtagacagttatagcacggcagtattgctgttgtctggcggtacgaccggtgttcccaagctgattccccgaacccatacagactatatgtacaatgcaagaatgtcagcaaagcgctgtcagttggatgaaagcagtgtttatcttgcggcgcttccggtagcgcataattttccactttgctgtccggggttgttgggaacctttgatataggaggaaaagttgtattggcgccaacaaccagtccggatgatatcctgacggcgattactgaggagaaagtaaccattacagccctagttccggccatggttacggtgtgtatggaaatgctggaatacgatgaggactatgatatttccagcctgaagattttacaggtgggaggagcgatgcttgaagactcccttgcagataagattatagaagaatggccgtgtacactgatgcaggtgtttgggactgcggaggggcttctatcttttaccagcccggatgatgatgtgaccgtaatagcaagatgtcagggcactccggtatctcctgcagatgaagtaaaaatcgtagatgaaaacgatgaggaagtaccgacaggagtttttggagaattgttgtcgagagggccttatacgattgacggatattatatggcggaagaaaccaataggacaagttttacagaagatggcttctaccggacgggggacaaagccatgtggacgggaaaggggcacctccgcatgggaggaagaatcaaagaacagattaacagggcaggagaaaagatcatgcctgcggaaatagaagcatatttgtgtaaacactcagacattaaggaagccgctgttgtaggcgtgccggatgagacattaggaaaccggatatgtgcgtttattttgacggaaaaaggaaatgcgctggatgtacaggctgtacaccagtttttgaaagaaattggtgttgcgtcttataaactgccggatcaggtagagattatagaaaaatggccgttgaccagtgtgggaaaagtagataaaaaagtgttagtacagatggcacaggaaaaacgaggagattatagagatggaatacagtgaagtaaaagaacagatcaaacagaaattgccggtacagaaagaatttggagattctgaaaatcttttagagctaggacttagctctatcgtgatcatgaggctggtcaaccagtggagaaaacagggagtaaaggttgcttttggaaccctgatggagcatccaaccctgaaagaatggtggaagattattcagaaaggtacgaagaaaaagggaaagaaagcaaaagcagaaaaacgggatatcataatggaaagagatatgcggaagccatttcctttaacagatgtgcagtacgcttattgggtaggaagagaggataaccaggtattagggggaattggctgccatgcatatttggaatttgatggatatggagttgtccctgaacgccttcaagaagcttggagtcggatacagtatcatcatcctatgttgcgagctagtttttctgaaaatgggatgcaaaaaatagagagtaaaccatactctgaaaagataaaaattaacgatttttcgttattaacagagacagaagctgaacaagaagcacaggctgtaagacgccgtttgtcacaccggaaattaaagatagaggaaggagaagttgcgggtctagaacttaccttgcttccaggaaataagacaagattgcatatagatttggacttgttaattgcagatgtgcagagtcttcaaatattattgcgtgatttggccatggtttacagtggagttgaattaccggaagaatccaaagattggaattttgctgcctatttagagcaacaaaatgtggaagatagagaagaacggaaaaaagcgaaggagtactggtctgctcgtcttaaaaatttgcctcagggaccagatatgccattagcgaaacgaccagaagaagtaaagaatccggtatttcatagaagagtcgtgaggattggaaaagaagaatgggattgtttacagagacgggcaaaagagtatcaaaccacaccggcaatgcttttgcttactgcatattctgcaattttagaacgttggagtaaaaataagagttttttgattaacataccattttttaataggaagacagaatataagggattagaggatgtaatcgcagattttactacgctactacttttagaaattaattgtgaggggaaccctacttttcttgagcttttagacaggatacagaagcaattacatgaagatatgaaatataccacttattccggcgtacaggttcaaagagatttgacacagatgtatggggacatttctgctattgcaccaattgtatttgcgtgtaatcttggaactgaattggtaaatagtacttttacggaaaactttggaagcttttcgtacatgatttctcagacaccacaggtatggaatgatttccaaagttatgaggatgaaaatggagtacagcttacatgggatacgatagatgaactttttccagaagatatgatagatgatatgctgacaagttttgaacagctcttacataatttgaggaaagaagattggaaccaaagatttgatgtactaccagaaagacagaagaactttgtgagaaaggaatgtacaataccagctgcttctgaacagaaagtattatttcaggaatttttcgaaaatgtcgaacgtagtccagaacgtattgcaataatagatactggaaaagagttagagatttcctacagtagattaaaggaaatggcacagagagtagcagcaggaattattaagcggaatataaaagaagaaagtatagcaattacaataccaagaggttatgaacagattgtggctgttcttgctgttctgatatcaggaaatgtttacgtgccggttagttgcgaacaaccttctgaaagacggaaattaatacatgaaaaaacagatattcattatgtaattactacagcagaaaaagaaaagcagatagaatggccggagaatgtggagatttggtgtgtagaaaagctgttggaaaatgaactgttggaaaattatccgaaaatatatccggaagattcggcctatattattatgacttctggatctacgggacagcccaaaggggttgaaatgtcacatgctaatgcttggaatactatagagtatataaatcgtaaatattgtgtagaccagacagacgcaattttagcagtttcagctttagattttgatttatccgtatatgaccaatttggtttattaagcgcaggtgggaaaataattttaattcctgaatcagaaagtaaaaatcccgattattggttaaaaatgatattcgaatatcatattacgcgttggaattcagtgccgattttaggagagatgttatttgaatgctggaaagctcaaaaaaaggaaaaaattcctttccgtacggctttttattcaggtgattggacattattgtatatggttgatatgttttatgaggctgtagaagatgggacattgattgttttagggggaacgacagaaacaggcatttggtcaaatgaacagatagtgaaactgccacttccagaaaactggaaaactattccctatggaagaccgttagagaatcaggcatatagagtagtggatgacttcggaagagattgtccgttttgggtagaaggagaattatggattggaggtgagggagtaggaaaaggttatagaggggatgaggtattaacaaaacaaaagtatattatggattgctttggacgttggtatcggacaggtgataatggatgcttctggaacgacggaacaatagaatatagaggaaggcgggatttccaggtaaaggtaaaagggcataggattgaattaggagaaattgaagcaatcttaaataaaatcgctggggttaaaaaaagtatagtgtgtgcagtagaacacaataatcgaaaaaatatgttggtggcagttgttgtaaaagagagccccaatataaatgaggagttccttatgcaaaatttaaaaagtaagcttcctgtttatatgctcccgacaaaaataatatttgaggataaacttccagttggaaaaaatgcgaaacaagatagaaaggaagtagtacgatggataaaagcgcatgaggatagaaatatagaaaatgaggagaagcttacaccatgcgaaacaaggatgctgaagatatggaagcggttgcttggtaatgataatattacgaaaaaggataattattttgtatgcggtggcgattccttattagcggttagaatgactgcagaaatagaggcagaatttggtgttaaagttagtattggaatcatatttgaaaataatacagtagaatccctagcaaaaagaatttctagtataaaagagaaaagaaagcctaatatagaggtagttcagcacaacgagcaggaacgttttcaagaatttctgactactgaaatgcaatatgcgtattggataggccggcaaaatgtatatgcattaggaaatgtgtcttcttattgttattatgaaatagtcagcaaaaatctttctatagaacgattagagagggcttggaatgaactgatcatagagaacgatgcacttagattggtcttttcaaaagatggaaagagacagaaggttttggaaagcgtaccttattacaatttaaaagtatataatacagacctggatggcaaagaaacagttgaatctattagggacgatatgtcgcaacaaataatggaagcatctcaatggcctttatttgatatacgtgtttctatatgccaggataagaacatagtacatgtcggaatagataatttgattatggacgcaagaagtgttttgtcaattttatatcagtggacacagcgatatgtgggaaataataaaagcaaattagaatccgtaagttttagagactatgtgtgtgcaatgaatgagagaaatatgttgcttaaagaccaagaatattgggaaagcagaatcagccactttccggcgtatccgaaaatcccgactaagaaaatgccacaggaaattactaagcaagtctttaaaaggtatacaaaagaaatgacaaaacataaatgggagctgctgaaaaagatcggtgaaaagcaaaacattacagcctcaaatatacttctcacagcatatgcacttatgttatgggaagagagtgggagtaatcattttgctttaaatattacgattgataaaagatggaatttgagtaaggaactaagacatactatcggagactttacaggaaacatactgcttgaaataaagatagatgagaaaaagacttttatcgaattggctcatgaaatacagaatcaactgatgaaagatctggaacattctgattttagcggtatcaaattccagagggaattatcaaaatatgacggaaagaaattccggtatggtattccatttgtgtataccagcactctaggtatggaaaatgaaaatgataatcttttcggagaaatttgttacaatattacacaaacgcctcaagtgtggttggattaccaaatccaagagagacaaggtgcattgtatttaaattgggactatttgcaaggattacttgatgaaacacagatagaaaatatgatatataagtattctaatcttctggattggcttatagaaaatggagattttttaataagtgaagataataattatcaggagggaattttgtgatgcaagaattgatagaaaaaataaatgaaagaaaaataaaattatggattggtttagacggagaattgcattatagagcacctaaaggtgcattatcgtcaggactggcaggagagatacggcaaaataaggtcaaaattgtagaatttttaaaaagaaaagtgtgtgaacgcatagtggaggttgcggagagaaatgataaaataagagtagcagaagctaaatggggagaagaagggcttctactccaggtagaaccagagctgatacgacagaattataaaatatataatttggcttttttgaatgaaaaaatgtcagaaatttggaaaagcgaaaatgctgatatcgatgctactgtactaaagcaatggatagaaacggcagaaagagtagctcttggcgaaatgtggaaggtaatgctggagcatgatttttttgtagcagagggacagcacttcacggtagaagaaatggagagtaagataggggttgctgataaatacaaacgcttttttagacgttggcttaaaattttcgaaaacgaaaattttatcaaggaagaacaggacggtttttgtagaacctctaaaagttggaaagttgatgtggctgcggaatgggattatttatggggggtggaaaaacaactaaattatggagaaggttttgtaaggtatttagaaaaatgcagtaaaagcctaacgcaattatttcgaaatgaaattgctccattagaattactctttccacatggtgaaatgacgacggcagttgatacatatcagaaaacgttgtcaagtaaaatactaaaccacatggctgagtgtgcagttttggaagcgtattctgagaagaagggtaaagttttccggattttagaagtgggggcaggggttggtggaaccagtgatggtattatcgaaagactatcagagcaaaatgtagaatattattatacagacgtatctacatattttttgaataaagcgaaggaacggtatcggggaaaaaattggattaaatataaaatttttgatattaataaaggtggtatggaagaaaacaagtttgatctaattatctgtgccaatgttctgcataatgctaaaaacggaatatctgtgttgcaacagttaaggggactaataaatgaagaagggctattagttattttagatgcaataaaagaaccttattatttgttgacatctattgaatttaatgatggactgagtgattttgatgattttaggaatgaagatgatagtaccttttttgaacgcaagcaatgggagtatatgttcggacaggtagggttagatattgttgcggcgtatcctgaagaaggagaggcttttttcggtctggggcagggaatttttgttttgggagtccagaaccatcatatggagataaatacaaaagaattgcgtgcgtatttaaagcagcaactagaagaatatgagttgccaaatgaaattaaaatagtaccatttttaaataatggaaaattaatgaataagcttccgaaaacaaaagagaaaacagtaagtgttgagcaaccaaaaacagaacttgaaatgcaactagaagaaatatggggagaagtgttaaataaggaaagcataggacgccatgaaaattttttcgcaataggtggtgattcgttattattatctcagataatagcaaaaatgtgggatagtcttccggagacgaaagcttggagttggggcgacttgatgagagaaatattagaaacacctacaattgcagagatggcggataaaattgaaacaaaagaaaagagtcatgaggcgattactactctcattgaagggacatctgaaagcaggattgtttatgtgatttttcatgctggaacagggtctttagtaccctatcttgatatgataaaaattttaagggaaagggaatttaagtatacgatactggggattccttgtatagaacaggatcagtatttgcaacttccagttgaacatctatttgttgaattagggaaaaagtatgctgagttgttaataaaatacaaggattataagttatactttattggtcattgtattggtggactgattgcgatagagacagctaaggaacttttaaaacaaggtacagaggttgatttggttactatgattagtacgaatatttatgatggagatgataaaaagcgggaggaaaattttcaaatattacaatcgaacttgatattagaaaaggtatttgggcggcttataggtgcagatgtccgtaaaagtggatttacgataacagataccaagcttatggaggctattcgtgttatttgtcaaaaaggaaagtttgtagaagaaaaattagttgaattgacaggggagtatcaagaggttgcaaatatgtgtcaaaaattgttagaaagctctcaccaagagcgtttgagaagtttgtttagcgccagagaaggtaaagtgagacatgccgagaataaagaagatagagaggtactttttgaaatctttaagcataatttgttggcggctttatattatgaagtgacggattattgtggaaatataaagcttttaaggtgctgtaatcagacggaaaatttttttataaatatgattgatggattttcagaagatgatatggtgtggagaaaatcaaaagtaaaggatatagtgactggggaggtacaaggtgaccacatatcctgtatggaatttccatacataaaagaaaacattaatctgataattgagggaatataaaacatggaaagatcactaataggtattttaggtgctagtggtaaagtgggacagttagtatgtgattacttggtaaggaatacagggtatatagtgaaagcagggtataggaaaactatacccttcctttttaacggacggctcaggtggcagttcgtagatatacaggataaacaaaagttatttgaattttgcagagactgtaaaataataataaattgtataggctctagtagaaacataaatttaaacctggcgtttatggcacatgaagtaggggcaatatatattgatacgtatggaacaggcaaattaaagaaagagcttgtaaatagagatatagtaaattcaggatgctatatattaggagcaggggtttatcctggcctaacaggtatagcaatgaactatctggtaaagaaatatccgagcattaagaagtggaagggcatggcaggaagttacgagccgataggcgctggagcagcagaagatttgctatatagctgtttatatgggtttggaatagaaaatgcatattggaaacacggtcaaataaaagtgcctaaaagaaaagagatagaagaaatatatatcccacaacttcaaaaaacgaaaaatattgcactgtttttgccggatgaaattctccagattgcaaaagagaatgatttagagacaatacgttggtataatatattgcccaataaagagcatatggctattatgaagaaggcatatcagaagttgctacagagaaatgatattgctacagagatccaagagtttgaagaaatcacaaggaaaagtacggagcattggaatattatatcttttaattcagatgacgcagaagtcgggcagatattagtaaaattagagatatcaaatacctctgcgtataaaatgacaggaatagtagcagcgttgctagctattaggagtgctcaaacaaaaagaaaaagcggaatttggaacgcatatgagactattcagatgcaatatgtatttgaaaaattgcaagaagaaggtgtgttcataaaggaaacgcaggaagtttctgctgtttacgaagaaagcgaagaaacaggtatactgtgaaagataactcgtgtaccaaaaatatagtactcgaagtactcgaactgatgtaaaagccagttagagtacggtcaaaagaaaaagcgtactctaactatatgttgtggtgcataaagttatcctttcttccttgaatgcccatgatttgggcgaatatagcctgtcaagggcaaagccgcttagcggtgcgtagcgccctttacagggcatgtgaggtcaaataccctacatctagggaagaaggaacagttggagtacggtgtactcgaagtaaaagtgccgtgtttactggctttgcggctggtatacacgagatatcataaggaggagaactatgtatgtattaatacatggaggttttcataataataagtgttggcatgatgtggaacagatattgaggaagaatggaaaaaaggtcacatctgttttacttccaggacataatgaaacagatatagaacggttaaaagacatcaacgtgacaacttgtgtagaaagtataattaatcaaataggagaaactgatgaaaaattaacattagtatttcattccatggcgggaatttttatatatgatacatataagaagattggaaaagaacaaatagagagtatctattgtgttgcttgttgtataccagctgctggagaaactatgtcagatattctgaagggaccgttacattcattcgcttcattttgtgcaggaaaaattcaggtggtaaaaaggttccctaaaattttagcattagccatttttggaaatgggatgaataaaaagcaacgagaaaagttgtatagtagcttatgtggagaaagtacaaatctgctttttgaaagaataaatgagtgtaaactagaaacttcaataaaatggattttgccaacaaaagatagggctctaaatccaaaacagcaaagagtatatatgaataacattggaaatataaaatccattattaaacttacggcgccacatgatgttatgattagtcatccagaagaagttgcaaaaattttattggaaaattgaaaaatataccaagagaggaatggtatcatgcaaaatgaagatcgacaagaaatttctgacacacttaaactgttaattcataataacaccaaatgtcaagatatgtcaggaaaaaaaatatatggaaatatacaaaaggtagaaaaaaagaatattacagggatgacttatcagctttcaaatgaaactggacatggggaaattacggtttatagagtgtttacaggaatagagctttactataacgatatgcacatggaatattgcaaccaaaaccaggccaccgtaaaaaatatgatagagattaaccactgtttgattggacgtttcgagtgcagttttggtgaaaacagttgctgttatatggcggaaggcgatctatccatcagctcaatgatgaagaaaaagtcaaattcgtgttttccgctgaaccactatcacggcatttccattatcatcaatttggatgagttgttgccggaggtgcggcgaatcatggagttactaaatattgatttgcactacatacaaaagtatatatgtgaaggtaaccgctgctgcattatgcgggctaacccgtctattgaacatattttttcggaactctatcatgtccgggaaaagagaaaaccgggatacatgaaaattaaaatgctggaactgcttctgtttttaagtgacctcaatacagcagaagaggttttgcagacggattatttcaatcaaaatcaagttgccttgattaaggcagtagcatcatatatcacggaggatttaacgacacaccacacgattgagcagctttctcaaaaatttaggatttctacaactgcgctgaaaaaatgcttccggggtgtctatggaacctctgtttattcctatctccgtacctaccggcttcaagtcgctcaaaagctgctgctggagacagagttgtcagtgacggagattgcaagcaaaatcggatatgaaaatccgaacaaattcacttctgccttcaagggaatgtatggctgttctccaacagagttcagaaagagtgtccgtttggatagaagcggtctatatggagtggcgaagaagtctgagctatattaaactatcctttgtcagataaaagcagaaagaacgcttgaagctggcctattttttgaatagccggttagatagtgctaactttctaaaagacaaaggaggatttccaaatggaaaatgaaaaatcgacaggtaacaaatatactgtcaaagatgcggctatcatcggtatcttctgcgcggttatgttcgtggtatttatggtttactcaaccctgaccggcgcttctctgttctactccatgattttcaatgccgctggcgcagcacttatcctcgcgccgttttatatttacatgtgcatgaaagtcggcaagcatggccctgcccttgtttacaatatcatgtgggcgattatcgccggactgatgatggggccgtttatgattccgtggtttttgggcggcggcatcattgcagaactttccatgtgcggaaagaatgcttaccatgacattaagcgtgtgtctatttcgtgggtaatcacggcgttggttcgtgctgcacatggtatgtcagaaatctggtttttcagagatgcgttccttgccactggtgtcagcgagcagcaggttcaggtccagacccagtattacaccgatccgaagtacgtccttttgagcctggctgttaccgctattctagccgtcctcggctgtatgattagcaacaaactgattgtgaagcacttcagaaagagtggcgcgattaaataagctatgaacatgaaatttgatttccgaaccaaattgcttgtcatagttcttactatgtcgcttgtggcggtgctcacaagcgacattttgatatacacgcttttgggagttttaagtgtgtatctgattattcagggctttggcaggcagactataaaatatctgattgtctgcggtgtttttattgtactgaggctgatttcaggaggacaaggcattacgattcttatgccagaaatgttcttgttcatggtacttcgtattttaatgatggttatggcggcgcagcctgtgattggtatgtcgccaggagaagtagtggccgttttcaagaaaatacatgctcccgatggaattgctttacccgtgacctttatgctgcgcttctttcccaccgtccgtagcgagttcgccgatgtttttgccgcccttcggctgcggaaactactgtcatggaaacaccctctggacgcgatggagtatattgttacacctgttattttccgctcatccagaatagcagaagaacttgctgcttctgctgaaagcaggggaatatccaatccagggaaacatacctgccgcagaaagatagaatttcaaaaacgggattggatcatgagcgtgattgctgtttgcgtaacagcactctattttgtgctggaaaggacggtagcgtaatggaaaatttcaagacaagacgatccgttatccagtttgaagatgtatcttttgaatatccgggagcggaaacagaaagcatccatcatattgaccttgatgtaaaagaaggcgagtttcttgtactgactggcggaagtggttgtggaaagacaacactaacacggctgataaacggattggctgaacaattttacgaagggacgctgaaagggcgcgttacattgctggggcgtagcatatctgaatatcctctgtatgaaattggtaaaaaagtaggctcgatttttcaagatcccaggagccagttttttgccagtattacagaggatgaaattgcgttcggctgtgagaattacggcgttccttatgaggaattggatgggcgagtttcaaatgccatcaaacgcattaacggagatatgctgcgtgggaaagagatttatcccatgtccagcggtgaaaagcagaaaatagcggtggcctccgtcaacgctgttgatccggaaatttacgtgtttgacgaaccatcagccaatctggatatgtattccgttgaggcgctgaaaaatctgatgcgtgaactgaaagaagaaggtcacacaatcattgtcgctgaacacaggctttattatcttactggccttgctgaccgcttcctctacatggaaaacgggagcataaaagcagagtggacacctgaagaactgctttccatgccagaggcaaaaagaaaggatatcggaatacgggctgcggatttacgccacattgaagtagacattccttccaggaaagaaaaggatgtgactttggaggtaaagggactggctttttcctaccgtaaacatccggttttccatgacatatcttttcaggcgtatgccggtgatctgattgcgattataggacataatggaataggaaaaaccactttgtcaaacatcctttgcggaatgcaaaaagaaaaagcaggacagattttatatagcgggaaagatgtttctaaaggcagacgaaaaaactttgcctattttgttatgcagaatacagattgccagttatttggggacagtgtagaggaagaattactcttgaacggaaaaggtagcacgcaggagcagagggatgatctgctgaaaatgtatggtctgtttgagtggaaagaaaggcacccagctatcctttccggcgggcagaagcaacggctcactcttgctgtatctgattggatagatacacccattttgattttagatgaacccaccagcggtcttgattacaaaaatatggtgcgaatatccgagcatttgaaggcgctggctcaaaaaggaaagacaattttaatcattacccatgactatgaatttgccgctatgacttgtaatcgagttcttcacttcattgatgaaggtcatgcagaaacatttcccttgcaaggaagtctgccccggttatattcctgtctcatgtgtcagtgagttatgtgtctgattggataggcgcgccctgtatggagtggcaaaaacaactgaatgattttataataataggtgagttagaaaatgctaacccacctattattgcgaaaggagccttgcttatggataagcaaaaaaatggagagctgtccagaatgttcagttacgcagggaattaccatgttctgaccattttgggctgtgtcctctccgggattagtaccattttttctatgctgccttttgtttgtatatggcttgttatccgtgatttgatccaggcattcgctgcgggggatatatctcgtgcaacggaaagtactcgttatgcgtggatagcagtcgtgtttgcagcagcaagtattttaatttatttcatcgctttgaactgtacccacctggcggcgtttcgtacagcgaccaatatgcggaaaacagcaattcaccatattgtgacactgccgttgggctatttcagccaaaatgccagtggacagctgcggaaaatcattgatgataatgcaggacttacagaagggttcctggcccatcagctcccggatttgaccggtgcagccgtcatgccggttgcggttattgttttgattttcctctttgactggcggctgggaatttgctgtctgatacctatggggatcagcgtcatctttttgaaacagatgatgggtggagataatgcacagtttatgggcaagtatatgaccgcattggaaacaatgaacaaagaggccgtggaatacattcgcggtatccctgttgtaaaggtgtttcagcagacaatttactccttcaaaaatttccatgcagcgatagaagaatatgagaaatttgcttccgggtatgctttgaaatgtcgtattcctcttaccggatttacagtaacgctgaacggcacatttgttttgctcattccggtggttatgtttattctatctgggatcagcggacaggcggcttatgaaaatgttgtactggatttcctgttttatagtctgtttaccccggtctgtgcaactatgatgaaccgtatcatgtttgccagtgagcagcttatggccgcaaaaagcgcagtcagccgagtggacgaaattttgcaggaaaagccattaaaggagccggagcatcctatgattccggcagacgcttcggttgtgttttcggatgtgtctttttcctatcccggtgccaaagaaaaagccttagaccatatcagctttgtggttccagcagggaaaacggttgcgcttgttggagcttctggcagtggtaaaagtacggcggcaagcctcatcccccgattttatgatgttcagtcaggttccgttacgattggcggcgtggatgtccgcaatattgaaaaacgagaactgatgaaaagagttgcttttgtgtttcagaatacccgcctgttcaaagataccttacttaataatattaaggcggcccgtccagacgccaccagggaagaagtgatgaaagcggccaatgaagcacagtgcaaagatattattgaccggctcccggatggacttgatacgctcgttggaacaggaggtacttatctttcaggcggcgaaaaccagaggattgcgttggcaagggctatcttaaaagatgctcctattatcgtgcttgacgaagccacagcatttgcagacgccgagaacgaacatcagatacagcttgcctttgagcggttgacccaaaataaaactgttctgatgatagcccaccggctttctacaatacaggatgcagacctcattctggtctttaaggatggacagattgcagaaaggggaacacacgaagaactattaaacttaaatggaatttattcctccatgtggaaggattaccagacatcaattgcatggaaggtcggaaaggagggcgaacagcatgattaaagcattgaagaacaagtatgcgttaagcaatcagggtgcaaaagacctgctgaaaggaattatttattccgtactggcaaatatcagtcttatgtttccggttattctgctggcaatcgtccttaatcaacttcttgcgcccattttgggaacaactgcaccggagattagcgccgtcgtttacacggtgattggaatagtgattttagccgtagtttttatattccactattgccagtacactgcaacatatctcggaacctatgacgaaagcgcacggcggcgtattggccttgcggaaaaattgcgtacccttccgctgacctttttccatcagcgcgatcttgctgatctgacaagtacaattatgggggactgtgcaaattttgaacacgcattttcccatacagttccgcaattctttggagctgttatctcaacaggcattgtttgtattggcttgttgatctttaactggcaaatgggtctggcccttctttgggtagctccgatttcctttgcaatcgtaatcctgtcccggaaatgccaggaaaaacttagcaaaaagcacatgaacgctagattagaactggccgaaggcattcaggaatgtttggaaaccgtacaggatataaaagcttgcaatcaggaggaagattatctccgcaaactggatgcgaagatggatgctgcggaaaaggcacagatttcctctgaaatgacgacagcaagcctgctgacaactggacagatgttcctgcggcttggtttggcaacggtaattgttgtgggtaacagtcttgtggtaaatggagatacatccctgtttacctatatcctgtttttgattgctgcatcccgcctgtatgatccgctttccggggcaatggcaaatatggcagagctgttttccgtacaacttcaagtggatcgcttgaaagaaattgaagaatacccagaagagaccggcgagattgagattcacacaaacggatacgatattactttcgaccatgtccggttttcttatgaaaaagacaagccagtgctgcgggatgtttcatttaccgcaaagcagggacaagtcacagcattagtcggcccatccggcggcggcaaaagtaccgttgcaaagctggcagcaaaattctatccgctggatggaggaagaatacttttaggcggaaccgatattgccccactcaattcaaccatgctgatgaaaaatttctctatcgtttttcaagatgttgtactttttaacaacaccatcatggagaatattcgtgttggcaaaaaagacgctacggacgaggaagtgattgctgcagctaaagcggctcagtgtgatgaatttatttcaaaattgccggacggctatcagacggtgattggagaaaacggttcaacattatctggcggtgagtgccagcgcctttctatcgcccgcgcccttttgaaagatgctcctgttattctcctggatgaagctactgcctctcttgacgtagacaatgaaacagaaattcaaaatgcaatttcaaagctggtcaagggaaagacggttcttattatcgctcatagaatgagaacggttgaagctgctgataacatcgttgtactgtcggatggcattgtagtcgaaaatggaacccatgaggaacttatgaaggaaaacgggctatatcacaggctggtcgatttgcagacggcttctgcaaattggaagttaagcgtttagcttgcaataaggaggtactgatgaaacttcatgcgtctggagaggactatctggaaaccatccttgttctccaaaagaaactcggtatggtgcgctccgtagatgtggctcggcacatgggagtgtcgaagccgagtgtatgtgtggcggtcaataccctaaaagatggcggctttatcacaatggacgaagatcactttagccatctgtccaatgtgggccgcaaggttgccgaaaaaatctacgagcgccattgcttctttactgagtagcttatcgccgcaggcgttgaccctgaaattgcggaggcggacgcctgccggatggagcatgtaattagttcagagagttttgaaaaaatgaaagcagcagttaaaaaatgagtatattatggacagattctttaattgaaaagagaggatacagaaaattgcgaaaagttcttttagaattataccgaaattaaagaaattttgcgctgaaaggacacaaataaaatttataatatatgtttggttatgtgacagattgtgtaagaactgcaatctaaaagattttgaaaatgggatatagagcaaaagaaaccagcagtaataagatgagtctttgcactgctggttttactctaaattctcactgggattatgctgaagtgttagaagttgttccgccagataatccagtgtgtttaataggatctttcgattttcagggatacaggcttggaatttccctatgaaccgctggatctcctcgtccgcatcagatatttccgggttaaacaaagtgttggcagaaataccaagacgtttgattaatggatagaggatctcgtaggaaggatttatttttcctttttcaatcatctggattgttttaatcgccacatgggattgatctgcgagatcttgttgtgtaagattacaatcgtttcttgcctggcgaatacagtttcccagataactcagtttatctttcggcataatcattcacatcacatatattctatcttgccgattaaggtttttacataaccttatcttgcatatttaataggcaatattatgctgatataaaatgaatttatagccctggtgaaaggtcaattaaaaaaaaacggcttttcacggcagggcttatttgtgtttcccatctgtgttctgccgtcaggagaaacatggatggttttgttttgaaaaaaagaaaaaggcttagcctagatgatcagttaaaaaaattttatctgcgggtggactaccgtacactcttcaaagagcattatcatacctatttcactggcataaaatcccatatgaaataaagctaaaaagtagcgtcaggaagctcaaaaaactccctggcgttattttttgtcgaaatttgtggaactttctccataaaccacggaaccgtgggccaccagtcatcggaaaaagattctgatgaaaggttttggagaagttggagaaaagtttttttaaatactttcccgctttttcgattttttatcagtttacctcctgtcctcgctgtgaaagggaggatcagacgtcttttactacggctttaagcagaggggaggtgatcccctttgaaactgaaccgtcaggaaaaagaaatcgtgcggagaaaattttgtgcttactgcattaaagttctgcgtggtgaggcactgaattatcttgatgaattggagcggcagagaaagcgggaagtaaatttttctgaaattcttcagaaagatctggagacgctgtactgttgcgatgattatgatatggcagagaattttacagtgatgggaaggcaggttccagtccgtgatgaatggatatgtaaagcattgaagaaacttcctataaaaaaacgggaaattattctgatgctttattttctggatatgacggaaaaagaaattgctgcctgcctaaaattagtgcagagtaccgtacattatcacaaagatgattctttaaggcttatgagaaaattgatggagtgaatctacatatgagatctaagaagcatagagaaccgccggagtttgaaaccatccaggcggctatagagggtgacgccgaagcaatcaatcaggtgctttcctattttcagccatttatcaacagtgagtgtaagagagaatacaaggatgaatttgggagagttcattatgtggctgatgaatatatgaaaaggcggatggagacaaagctgattacaaaaattctggattttaagatccggctataaccacaggacagaaatattccctttctatttctgattctgaacgcactgtacattgaaaactgaatattttatcctgcaggacgaaaggaaacagtagagccgggcagcagatacgccaggatgattcaatctcaattttcgctttgcgacattatggcgtaaagttcatgtttatagacagatacggaatttgaagatggataggagcgaagaaatatcatgctgcgggcagagtgtgggaactttgtggcgaagacactgtttctcataatgatacttccggggaggctgctccggtctgaaaagatggtgagataccaatgaggctgttccccgacagccgcctgcaggattttttgcagtggcgaaaggggagaatgaaatggatataaaaaaattactgcgatatacaatgcagttggctatgttaaaacagcttttaacaaagaaattgattgatgaaaatgagtattcgttgatacagaaaagactgatgaaagattatggcattgtttccaatattaccgcttgacgaatcttttgtgctgatctataataaaatcaacactatgataggaatacaaaaataaaggagcggaaaatggaaatagagttgattaaggcaaatgaattttctgaaggctctgccagaaaacgtgtcgagcgattaagagttgccgcttattgccgtgtaagtacggacgatgaagatcaaataaaaagttataattctatggtgagatactatacggatctcattcaaaataacaaagagtggatttttgcaggtgtttatgccgataaagccattacaggaactaaaacggataagagagatgaatttcaacggctgattcaggattgtatggatgggaagattgatctaatcatcgcaaaaagtatcccacgatttgctagaaatacgctggatactttaaaatatgtccgtatgttgaaagagagaaatatcgcagtctactttgaagtagaaaaaatcaataccttaaaagacggcgaatttcttatgacgatcctaagttctgtggcgcagcaggaggttgaaaatacttctgcttatgtgaaaaaaggattaaagatgaaaatgaaacgaggagaacttgttggttttcagggctgcatgggatatgattatgatgtagcaacaaaatccatttccattaatgaggaaggcgcaaaagttgtccgctatatatttgaacggtatgtagcgggagcaggaagcactatgatcgccagagaactaaatgaacaggggataatgacaattaaaggaaatccctgggtgtcatccagtgttatgggaattataaacaacgagaagtataaaggtgacattttattaggaaagacatttacggttgatccgatctcgaaaaggcggttggagaatttgggtgaagaagatcggtattatatacatgatcatcacgaaccgattatttcagaagaaatgttcgccagagcgcaggaaatcagaagccgtagaaacggaaaccgtaagcatggtgttacaccgggaaaaagagaaaaattcagccgacagtatgcttttagctgtttgctggaatgtggattctgtggagctaatctttcacgcagacgttggcacagcaattcaaagtataagaaaacgatatggcagtgtgtgaaagctacgaaagatggtaagcgtttctgtccggatagtaaaggaatccctgagcaggtgatcgaggaagcttttgttgagtcatatcggatgctttgcagagacaataaggacgtattggaagaatttttgaagcgtaccgaaaaggctcttggagaaaattccgtagaagatcagttaaacaagctgcaaaaaaagattgataatctttcatacaagagaaagaagttgttggataattatttgagcggcattgttgagcaggatatttatgaagaaacagacgtaagtctcaaaacagatttaagtaatgcaaaggctaagttggagtattttcaacagcaggcggatgaagaaagttcgctgcaaaaaaggattgcagactttaagaaagcactgtctcataatgaggtactggaagaatttgacagaggcatattcgagagtataattgaaaaggtaattgttggcggttacgatgaaaacggagaaaaagatccctataaaataactttcatatataaaacaggatttaagaatgaaattggaaacgcaaaggaacgtttcgacaagtctaagagcgtaggggacaaagctaaagaattgtgttcccatatcgtaaacgaggtaaaagatgtgtgttcctatgttagtgacaacacatgtcgagacggttgttcttttgtcccaacaaaaaccagatgacacgatagagatcgacttagacctggacgagctggatgccaccagtgccgagttgaaagcaacctatcaggaaatcaaagattatgtgctgaaagaatttggcttgaaggtttcaagtttatatatttctcaggtaaaacgcaaatgtggaattgaagtgggagaaaactataatcttccaaaatcagaaaatgcaagagttccgcaatgcccgaacgagaaagaagatgctatcaaggctgccctgaaatattatgcgatgatctaaggacatcgctgatttcaaggaggaataacacatgaaaagcacatttgaaaaaatgggtggaacctacacacttggcgcagacggaatttactatccgaatcttgtcagtacagatgaagaaccgcattatgggaaatatggaatgatgcggaaaacatatctgaaagagcatcgtccggcaatgtattcaatgtatatgttggaagacagactgacagaacatctgaatactgtggacgatgaagcacaggagagaatggatattctggtgcgtcagatgatggagaggcagggcattacggaagaattgaaagcttgtgaccagatggaatgggtcagagcggtaaataatgtccggaatgctgcagaagagattgtgttgaaagaattgatttacaggtaaacaaagggctgaacaggtaggacgaaaaatcctatttgttcagctcttgtgtttataatgggcaaagaagaaccaaattataattccatatcatacgaccttttcttagtccgagcaggctgatttcgccgtatttcctgtttcctttgatattcaagttcccatgcacgatgggagaaaacatcaggatcttccacattgagataatccacctcattggctgcaatatcacggcggtgatagtcataatatttaccgaaagtccccttgagctgctcgatcagcttatcccggaaagcaggacgtatctggagtctagtatccagtaattcagtatattgttctggttcaggacgaaatttttcttcccggaaagcggcggcgtctttttcaagctgtttttgtagcgagatgtcctgagaatctaggatatcaagattgttattcatctggtcgtatttcttggatagattcgtcatatctttatcggtagagcattctgcttggaagattagctgctctttccttgatttcagttcttcaatttcttcgttaacagtggtaagctgctgattcaattttatatgctggatgggattaaaaatactggctttctcttttttcacattcagttctttccgctctgtaactttagctttgagtttctttttaacggtgttgtatttattcagtattggattaaaatgattcatccagtcatggatcacttctttttgcatctcattgtggagcaaatgatattgtgtaaaaatcatgtgattgcggattgcttccaatgtttctgctattattggaatagatttttctacagcctgtgccagttttgctacctgggcttttaattcccggagcattttgttatctgcacgaatctgacggttgatttcacagcggtctgctatcatgcctttcttttccatattctgggcaatgtagccttcatggatagttggctgttcggtgattccctgatctgcaaagctgcggtgatcaatggtagcatttatctgattacgtgcaagcattttatttacggcatctgcccagtttgcccgccagatacaaagttgttcatcactgttccattgttgggaaataggattctgtctgccatatcggctgctcttggggtgtttatcaattcgttcatatcctttttcctgtgcaacagaagaagtcagatattctttctttttcccaactttatagcgatattgcttttcccatccctgtttctgagcagttttaaattcagaagcagtaaaccctttttcttccccatctttgatacagagatattctttttctgttttatactgccatgttccattttcatttaatggtcggacagtaagaagaatgtgtgcatggggattgtgaccatctgtatcgtgaatggcaaaatcagcacacatccccatatctacaaaattctttttaataaaatcttgaagaagagaaatattgctgcctttatccaactcaacggggagtgcgacaacaaattctcttgcaagtcggctgtctttggtcttttcgttttcttccacagcattccagagttgttcccggtcattccattccaatggagccattggaggaagcatcacctcctgatagatcagcccctgctttctggtatagtcatgctggatgccgtcataatcattgtacatgcggctacagctcatataagcagaagcagcaacagcagaccgaccggaaccacggctgacgactttggcttgcatatgataaattgccatatctggcacctcctttcgatgttgcctgcaacagcggataaagccctcggcagagcgcacgagccccgaaggggataccactgcctgatttatcaggtggtgagtaagtgcgcccttcgggagtagaacttgtgcgtttacattccccgtagccggatcatcagctcccgtttcagggaatctaaatccatttctttaatatggggaacaatactttccagaattgctccttcttggactaacctgtgtgttctggcatcacgttcttttttgcgatttcttgcttcggcttcttcctggcggtgtcttgcctgtaaaagtgctttttcttccggtgtcatgatttttttatctgccatatctggcacctcctttttatgcccgtatccgggcagttttggttttaaaatcttttggtttggtactatggttttagataactgacagtgacatatttccggtaataaatgagaaaagaaagtagtaccactgtcagtgaaaagtaatcattgtgttatacttttttgagtcaattctggtttggagcatgattgttcaacaggatttttttcgcctgttttaaattagctgttgcattgtcctgacgaatattccggttattgatacggacaggaatacatctctccagaatacggtcataaattcgtttgtgtgcgatatcagcggcgttattcagctctgataaagtgagattggtcgttatgatcaggggctttttactgcggtaacgactgtcaatcacattgaatacctgttccagtgcaaagtcagagttccgctcaattccgagatcatcaataatcagaagactgtagcggtttaagctgttgatgaactggtttctgtcttcaaaatgcattccggtaagggtatttagaatccgagagaagttggtcatcagtacaggaatgcctttttccagaagggcattggcaatgcagcctgcaaaaaaagattttccagtaccgacatcaccccaaataagaagtccggaagcgtttgatttcatctcttcccagttacttacataattgtgtgccagttttatttccggattgatgccgttatccctggcaaacgtgtagtcgtagagtgctttgtcctgtaagccactggttttaagatgctctatttccatttgtttttcatgaagttttctttgggcttcttcctgctcaaagatttcctgctggcatttacagcggatggaaggaataagaacttttccctgtaattcatgccggcattgtcttggcgtattgcatttggaacagtagatcaggtggtctgtttcgttaaaatattcatcaggctgaatctctctgtttggtgttatagcggttgctttttctgtaaattttgtcataatgtttcgtattcctcactttcgtaatttctttgccgggaagcaggatgatcctgtcttgcccaactgatgatggtagctgcatggttctgatattgctttccggtagaagccatataaccggataagcgttcaatataatcctgccagtcagggattgtctgccggatatcttccagctctttttctgacagaaaaacattttgaaattttccatagggtgagagtggctccttactccctcttattgctaaattgttcttttttatctctttcttattaccagacagttttctgtctgtatcagggaaagaatcctgtctgtcaataggacagttttctgtctgtcttagggaaagaaatctgtctgtatagtggatggcttcttttgggagttttacataaattcgattgggctgtccgggtccctgccgttttcggaagataagctcctgtttttccagtactgccagagcagttttaaccgtcatctggcttttgtggagaacttctgccagtgcttcaattgtaaagtaaatgaacatatgaccatcgatatctgaccagccctcatttttctgggaaagccttgcccggtcgagcaggataatataaagcattttggcagtttcgtttatttccatgtccagaagaaaacggggaaacatcatataagatggcaggttggtgtctgctgtcagaaagtccgtcatgtgttcacctccaatcagttattcgccaagaaaatcccagtctacatcactatctggcagtgaattttcaggtgctggaaaggacgccctgatttggggctccctttgcaccatgcctgcagtcagtccggaaagaaaaagtggcaatgcctgtttcagactgttttccactgcatctataatctgtttcacaaaaagttcttcccgttctcttgtttccagataaggatcagcctgtgtgcggtagtagcggtcaaaataatctaccagtgcaagagagattacctgactgtaagatttaaaatcctgcctgtccatcgtctgtaaatattcccaggctctccgctgctgttctttgtccagattaaagcgtaggtttgtgttgcggatattgttctgcatggtttatcccctccttttatcgtattgattgattcagcaggttgtaccggtgtggtactgctttgctgtgagataagcatacgaaaatcagaggaaaaaggcattgaggggaaattgagttggaattgagaaaaagatgcaatattttttgagttgaagtataatatcaagtgttaagccaatagaaataaaaaacgttattgctaacgtgtatataagaacaaaggagtgaattacatgatgtataatccacaacttgatacatttatctgcgttgtagaagctggaagttttagtaaagcggcagaagaattatatataagtgcacctgcggttattaaacagataaattctttggaaaacagcttaaatttgcaattatttgaaagaacacacagaggtcttattattacggaagctggtaaatcgctctatcaggatgcaaaatatctgattcaatattcaaaagaatcgttgatacgggcgcaggaagcaatgaatcataatgaagaaatcattcgtgttggaatatctccgatgacgccaccggaagtttttgtggaactttggcctaagatacagaaaatatatccggagatgaagtttaaattgattacatttgaaaatacaccagagaatgcaagagagatactggctaatatgggaaagaatattgatgtgatagctggaatctttgatgaaacaatgcttgaactcagaggctgtgatggcactgagatttcaagagaaccattttgtgtggcggtatcaattcatcacaggctggcaaaaaaagaaaaaattacacttgatgatctggctggagaaaatcttatgctcatgcgaagaggatggagttattatggcgatatgctaaggaatgatatgatgaaaaatcatcctgaaattaatattgtagactttaatctgtacaatgtagaagcatttaaccgatgcgaaaacaataatgaggtattactggcattcaagagctgggaaagtgttcatccactgatcagaatcattccagtagagtgggattatactatgccgtttggaattcttcattcgaaaaaaccgtccattaaggttaagcggctgataaatgctattaacaaggtaaaataaaaattgaatacatgcgagtagaaacctaaaggttaatactgaataacaaaacgagacttctaatggagtctcgttttgttatactttagctgaagtgaaaatggaggatactatatgcagataaagaggatagctcttggaggaatcatcatgactgttatcatgttcacgccaacctatgcctgtgtcggaacaagtgacggaattgcatcatacagaagtatggaaaaatatatttcccagatacaacaaaatggcccaaatacaaaaatagaagtatttaaaggcctttctcatggatttggattgggagaggggactgtagcagaaggatggattgatcgtgcaatatctttctgggaagacaatatgaatgctttagataagaggtaggatatgaaaaataaacgatttacagcaaaaatattgatagatataggaatgacgatatgtttgcttcttcttatgccatatagtctgctcagcgagactgcacatgagtggattggtatggcgatgcttgtgctttttatttcacatcacatactgaatcataaatgggtgacctctgtaaggaaaggaaaatataatgcgttcagagtgatacagacagtactggttatcatcatgcttattcttataatgggttccatgataagtggaatattgttatctaattatatatttaaatggataaagatttccggaacatatatgacagccagacagatacatatgttttgcgcatactggggactggtggtgatgtcattacatctcggatttcattggaatatagcggtagcaatggcaggacgattatgggaacatccatccgtcatcagaacatgggcagcaagatctgtcgcaaccacaattgcaggttatggtttatatgcattttacaggagacagataggagattatctgattatgaggatgcattttgtattttatgattatgaaaaggggatctttccttttctgctggattatctggcagtaatgatattgattgcatttattggatattatagtggagtgtttctaaagaaaacaggtaagagaaaacgaaaaggttcatactgaaagaaggtggtgtatttatggaaaagcggaaattagtacttacaattattggagttgttattttagcaatggtaatcatggtatatatctacttttcaaaacctggcaaggatgaaaagaagaatcaacaaacaataaaccaggtacagaccgtacagcagaagacaaatgagaaaaaagaaaatacagaaaaaaatacatccggagatgaattggaaaatgttacgccgggaagcgaagaataccggggcttcctcctggataatgttcttcattctccaaatgaaggggacattcattacaatgtatatattccggatgcatatgacgggacaaaggaatatgcactatatgtaacattacccggatatcagggattatattttcagggcgtgggagaaaatatccggacagaagattttggatttgaagcacagaagtatattaccgatatgattattgtagctccacagttaaatgactggggacagacatcagcagatcagacaattgaactgacacagtattttctgacgcattatattattaatccatcgaaagtatatattaatggttattccggaggaggagaaaccctgtcactggtattggcaaagcagccggaattatatacagcggcacttatgtgcagctctcagtgggatggtgcatatgagccggttgtggagataaaaacgccggtatattttgtgattggcgaaagcgacgaatactatggatcagaaccttttaaagaggcataccagcagatacatgagctttacaaagaacagggattatcggaatcagagattgataaactggtggtactggatgtagaagataaagattactttgaaggaacacaggtcacttatcagcatggcggtggctatctgttttgtcgtgacaaagaaattatgggatggctgttcaatcagtaagaaccagaataaaccgaaaggttaagactgaaaaacttatcgaaacttctcaaaggaatctatcagtattatagtatgaatgtaagatgaatgaaagaaaacaaggaggatacgacaatggaatatatttcattaaataatggtgtaaaaatgccaatactgggatatggcgtatatcaggtaacaaaagaggaatgtgaaagatgtgtgcttgatgctttaaaagttggataccgggcgattgatacagcacagagttattttaatgaggaagaggttgggaatgcaatccaaaagtcaggcattccaagagaagaaatcttccttacaacaaaggtgtgggttgaacattatggatatgaagaagcaaagaaatcagttcttgaatccatgaaaaagttaaagacagattatctggatctggtattgcttcaccagccattttcagatgcttacggtgcttaccgtgcattggaagatctgtacgatgagggaaaaatcagagcaatcggaatttccaacttttatgtagacagaatggttgattttgcatccttcaaccgcattaaacctatggtaaatcaggtggaaacccacatcttcaatcagcagaaagagatgaaggaatgggcagacaaatatgatatccggttagaagcatgggcaccattcggtgagggcagaggaggcacctttgagaatcctgtcatcgcagagattgcagaaaaatatcagaagactccggcacaggttatgcttcgctggcatattcagagaggggtagtggttattccgaaatcaacacacattgagagaatggaagaaaactttaatgtttttgatttcacactttctgatgaagatatgaagactattgcagaactggacaagaagacaagctccttcttctcgcatcaggatccgaatatggtggaatggttcgtgaagatggttgaggaaagaaaaaagaataatgacagttcaaaagaaaaaaagaactggtaagcataagaggaaaaatcaatgaaagtattacttgtcaatggcagtccacacaaaaatggctgtacttatacagctctttgtgaagtatccagtgcattaaatgaaaatggtataagtacagatattttctggattggaaataagccgatttcagggtgtattgcctgcagaaaatgtcaggaaaaaaataaatgcatcctggatgatatcgtgaatgaatttctggaaatagcaggggattatgacggattcgtatttggaactccggtacactggggtggtgcaggcggtgcaatcacatcctttatggacagagtcttttatgccgatttaaacggtggcggcgacagattccgcctgaaacctgccgctgtggtaatttcagcaagaagggcaggaacaacggccacatgggaccaggtaaataaatattttggtctgatgcagatgccgatcattacatcgagatattggaatatggtacatgggacgaatccggatgaagtaaaacaggatctcgaaggaatgcaggttatgcagatccttggaaacaatatggcatatttcattaactgtaaaaatgttgcgacaaaaatgggaattgaaatgccaaaggaaccggattttgtatttaccaatttcattcgatagaaattagcgtgacaaacattttatacgacaggaggtagccttagaatgaaaacaaagaaaacagcagcagtactcttaacatgcatcatggcaatcggtttgatggcaggatgtggagcaagcaatacaaaccagtctgcttctaataatgacagccattctacaagtacaaaccagtctggaaatgaagaagcggatacaaattccgaaaacactacagatacaacagaaaatacatcaacaggaaatggaaaaacattggttgtatattattcagcttcaggaaatacaaaagatgttgctgaaaagatagcaagaattacagaggcagatctgtttgaaatagagcctgtggagccatatacagatgatgaccttgactggacagatgatgacagccgggtgtcaagagaacatgatgatgagagcttaagagatgtggaactggtgtctacaacagttgataactgggattcatatgatacggtatacattggctatcctatctggtggggaattgcagcatggccagtagataactttgtaaaagagaatgactttacaggaaaaacagtcatcccattctgtacagcagcgacctcgggaatcggtgacagcggtaatcttctggaagagatgacaggaacaggtgactggaaagaaggggaacgattccatggtggagcgtctgaatcagatatcagttcatggatagacagtcttggattataaaagaatataaaaatatttggaggaatcgtaacaagtaagacataacctttaggtttaaactgcctaacaaagagagacttctgtccggagtctctttttcttatacttacagtaaagtttgaaatatagaaaaggaagataaagatggagataagaattttaggaagagacttagaagtatcagaaatcggatttggatgtatgggaatgagtcatgcatatggaactgtttcaacacagaaagaagcagaagaattgattgaaaaagcgatcgatgaaggctgcacattttttgatacggcagagatatacggaacaacagaagaccctcatcacaatgaaaaactgcttgggaaagtgttaaggccatatagaaacaaaattgtccttgcatcaaagtgtgggatacgttttgatgaaactgcaacaactgtaaataaacctttgattcctgatggacgaccggagacgattaaagcatcgattgagggatctttaatgagacttaacacagaccatcttgatttatattatattcatcgtattgacatgactgtaccgattgaagagacggcaggagctatgaaggagttaatggagcagggaaaaatcacacactgggggttatcagaagccagtgaagagattattcgacgtgcacataaagtatgcccggttacagcgattcagaacagatattccatgatgtacagggattatgagaaattattcccggtgcttgaagaattgaaaataggatttgttgcattttcgccgcttgcaaatggattactgacagcagcatatcattcccatggggaatttgaaaagccgggagattatcgaagcgcaatgccacagtttacagaagaaggattaaaggaaaataatgaatttatgtcctggatgaaagtgattgcagaagaaaaaaatgccacgcctgcacagatttctcttgcatggatgcttgcaaagaaaccatatatcgtaccaattccgggaacaagaaaagtaaatagactggaagaaaatatggaatcagcagatataaagctgactcaggatgaagtaaaatctattgatgagatgcttgcccatatgccgatgtcgcaggtgtttggaggttcaaaaatacagaagaaataaaagaggtgagcaatgaaaacaaggaaaaagataaccatcggggtaatagtggctttcttagcggtagtcatggtgggttatatctatctgtttacaggggttaaaataagtaaaggagaatagagataatgaagaaaatgttagttgtatattattcctggtcaaatggaaacacgaaaagaattgcagagcagctgactaatgggacaggtgcagatattgcgagaatcgaaacaacagagccatacagcggcagtcatgaagatgtggttgaacagggaaaaagagaggtagaggcaggctttatgcctcagatcaatccgatatctgtaaatcttgctgattatgatgtgattgctatcggaactccaacgtggtggtatacgatggcacctgcagtgcttacatttttgacaacaaatgattttataggaaagacagtgattccatttatgacaaatggtggatggccggggcatgttataaaagatatggaggaaaattgcaaaggagctgcctttgcacatgaaatgcagattcagtttgattccaaaggaaaagatcatctggaaacttcagaagaggtgattacagaatggattgggcagataaatactgatataaacaaataaccataaggagagataaaacaatgagaaaaaattttggagcaaagccatttttatatccacagccggttatgattctgggaacctatgatgaaaatggaaaggcaaatgcaatgaacgctgcatggggcggaattgtaggtgcaaatgagattattgtagatttgtctgcccataagacaacagacaatattataaaaaataaggcttttacagtaggggtggcagatcttgaacatctggttgcctgcgattatgtgggaattgtttctgcaaataaagaagcagataagatgaaaaaagcaggctttactacaacgaaaggtgaatttgtaaatgcaccaatcatcaatgaacttccattgactcttgagtgtgaacttgtaaaagtcattgatggcagcaagtatcttgcggaaattaaaaatgtaagtgcagatgagaaatatctcggtgatgacggagaaattgatcttagtaagtttacaccaattacatatgatccggtacatcacggatattacagacttggagaacgtgtgggaaatgcttttacggatggagcaaagttaaaataaggacaggtgattaaagtgaaaaaaattgtacagacagcaggaagaaacgcactgaatgaatttgcaccacagtttgcacattttaatgatgatgttttgtttggagaaaactggaataatcaggatattgatgtaaagacaagatgtattataacagtcacagcacttatcgcttcaggaatgattaatacatctttagtacatcattttgaaaatgcaaaagctcatggagtgactcagaaagaaattgcagccgtgattacccatatagcattttatgcagggtggccaaaaggatgggcggcattcaatcttgcaaaagatgtctggagtatagacgaaggtgatctttcatatgaagatgaagcaatgagagctcatgctaaaaagatgatattcccgattggagagccaaatgataaatttgcacaatattttacaggaaaaagttttttggctcctgtgtctacgtcacaggttggaattttcaatgtgacttttgaacctggttgcagaaataactggcatattcatcatgcaaaaagcggaggcggacagattcttatctgcattgcaggacgtggatactatcaggaagaaggaaaagaagcagtagaaatgaaacccggagattgtgtcaatattccggcagaagtaaaacactggcatggagcagcaccagatgaatggttttcacatctggcaattgaagtaccgggagaaaaaacatcatccgaatggtgtgaaatagtaacggatgagatatatggaaaactgaaataagtactttctcccaaaagtgggaaaaagaaattttacggcgaacaattatgtccgccgtaaaattatgtctgttttgttaaaaagtctgatagctgttgtccaagaaagaaaccaacctgtggatataactcctggatttcctgatattttgcttcaatcatttctggttcatcagtccagatcttttcatatattttgaaagctcttttaaaatgtgttttggcttgcggaagattggcagtcattagataaatggttccaagggtttcctgtactttggcataatccagacagtgatcggaatggtattccttgatgatgccggataatttttgcaattcggagattcctctttcgggttcctgctgttctgtcaggaacattgcataattggcaatctgaggtatgctgtcatttatatgaagcaggttaaattggtcaagcagtgagatacttttttccatgtgttctcttgcaagatcgggatgaccgttcatgcggtaaagtccaccgagattggcatgaaggttggaaacaaggcgagcattgtcaacagtgatagtttctatctgggcaagtgcatctttttccagttttattgctttttcaggtttagtttcaagagttgcctgaaaatccagtaataatgcccggtcggagtcggtgccaatactttttgtttttaatagacatttcaattcctgaatgattccattcatacctttgtggtagttatagttatccatgtatggaaatgcattttccagaaaaagcagatactttggtatatcatccttttcaatcaattctatgatatttccgattgtttgaaacagtttcttgtaataatcaacttccattccatgcattaaacatatgtgctgtaaagaatccagtaatatgtggcagcgagttacagatggttttgtctctgaaagggtgatttcctgaatcatcggatgcagagagatagtgcgacgtgttgttgtctgaacgaaaccagtctcaattaaatcgttgatttcatttagtgtgggcagttccagccatttggcaaatatacgggcagaaataccggtggaaggaagaaagcacatattacacatgatatcctgctgttcaagagataaagtgtataaagaaaacagcgtatggatatgactgtaataggtggctttgctgctttgtccatctttgattattttaattttatcttcgttatggaaagatgctttttccacctgaagtcttgttaataactggtctggagttgagattccattttccagaagttttgctgccagttccacggcaaaagtatgagaatgaacagtttcgatgatcttttcaactgttgcccggtacgtgtctgcctctgaataaaatactgatgccagctggaagagagcgttcatattctctatttcttttaatggcagagtacagtattcatccagtttgcttctggttgtaaacaaaatctggcagcgatattttaatactactgacagaaagctgtcctgtgtcgcagtgacattaaaattatctatgataagcagagtatcggatttcagggaacgaaggaaacggttatgtctttgaaaccgttcctgttcagtgctttccggcagatcgtcaataaaatccatgtcagtaatatcctgatgaagattgccggtatattctacataaaggatattggtgtattgctttatgtaccgctttgcgtaggctttggcaagttcactttttccgattccggcgattccgcaaagaaaaacatgacggttttcctcaagcatggtatataattcttccagttctttatctcttccgataaaatgacggcatggtttcggaacctcactgtccataatataatccagtacaataggggataaagcgcctccggcgagcagcttctgatttttggtattacgtttgatgaattggcgttccatgccaaaagaaatcagttttgcaagaaacagcagtcttgaactggctggtttatataagggagtcagatttttctttttcgcatctgagatgctgtcatcctgaatgaataaagtgtaaatatcttgtatagccatattacagtcagacatcagtggaagaagattctggtggatggtatgggctaatttttcctgattggatggcttggaatagtaagcggatattttaggactgattttagcctgaccagtcatccagcggcaaaccagaccgttatccattgaaaaatcctgatttgccggatcatccataaaatcttcaaataattcgtataaaaaatcaggctgactcatttgattactttcgctgatatgattttttaagcaagtgctaatagaagaaaaatcgcatcgattcaatagaaattcccctttcgtagttaagattgagtatatctatcataacacgaacatatattcgattcaagaaaatacggatatttttaaagtgattgtgtcaatttacaatcaatttctattcaatgtggttttcaggcaggttctgtaaaataagctcagaacaaacaataacgggaggagcttatgcaacagaatattgaatttgagcggtgcattgattttctggtacggatgattgataagtacggcgaagaagtcctccgggagttggaggaagaaaaacagaataaggaagaaaaagaagcggcagtttcctgaaatacaaaatgtaaatcagactgtcgcttttttcatgcatttttaaatcaaataaattttaaaagctgatgcagagtgtgtggctcattattctgagaagcggtaatacgcgtatcaaatggcttgaaatgattttgcgtataaaagctcagaagaaattcattatcttcgcattcaagaaactccataacgccacctacggaatatttgagactggatatggtttccagtgcaaatcccagtagaatatttccaggaattcgtttttcctttggaagagaatagttctttcccaactgggcaatcaggtaagctgcggtagtataggattgtgtttcttcatccaaaatactgacacgggacagtttttttgccattgtcttgctgatatttgaagcacggacagagattggttttattgtaagtgaaaaataaccaaccagtgaagcatcttcagcatcaaataccagataagtgatagattgatcttttttggtaaactcaatcgcattatgtaataaaaagtattccacatcgggatttttgggacaagaaaaatcggagagtaagtcgtaaagactttcctctccgatatatgtcggttcgtctttatccaaatatgcccgaatattaacggtaaaatatttatcagacatgttttttcttcctttttgacattaaagctaagatttcctgtgggttcgttaactgacgtccgggaagtgtctgctttggtgtgcggtcacggtcggcttcgtcaattgctgcgacaaaacgctttacgctatttggattggatacgacaaaattatgagtaatacttgaagtagccatactaacacctcctcttttttggcttttttgtgtatttatagtatatgcaatgtgtgataaaaacacaatatcaaaaacagaaattatttctaaataattttcaagccggacatttattagacgcttccggtaagcgaacaatattttcgagccaatcatttataagtcgccaatggtgggcgggcaatattttgataacagaaatgctctgtatctaacttaattatacgattggcgaagaaatgcgtcaatacggaaaataagtattgaaaatagttggaacaagtactaaaataaggttgggacaatgaaacagagttatactgcgaggaagattatgaagaataaaaagattaaatgcgatatatataccagagtatccacaaccatgcaggtagatggctacagtctggatgctcagaaagaaaaactcaagagatatgcggaatttcagaatatggaaatcgtaaatgagtattcagatgaaggtaagtctggaaagagcgtagagggcagaccggaatttcagagaatgttggataatattgagaatggaacagatgaggtacagtttgtactggtgttcaagctttccagattcggtcgtaatgcggcagatgttttaaattctttgcagaggatgcaggattttggagtgaatctgatctgtgtagaagatgggattgacagctcaaaagatagtggaaagctgatgatttctgttctgtctgcggtggcagagattgaacgagagaatatccttgttcagacaatggagggacgtaagcagaaagccagggaaggaaaatggaacggtggatttgctccatatggctatgaattggtaaatggagaattgcagattgcagaggacgaagcagagattattcgtctgatctatgacaaatttattcataccaatatgggaatctctgcgattgccgcatggctgaaccagcatggatataaaaagaaaaaacgacagaataatacactggacgcatttgcctcttcgtttataaaaggcgttctggataatccggtatactgtggaaagttggcttatggacgaaggaagaacgagaaagtttcaggaacaagaaatgaatatcgcattgtaaaacaggaaaattatatgctgcatgatggtatccacgaaggaattatttcagaaacagattgggagctggcacatcaaaaacgggaaaaaacaggtgtgaaatatgaaaagacgcatagtctggatcatgagcatatcttatctggaatattgagatgtccgttatgtggaagcggtatgtatgggaacgtgaaccgaaagaaaaagaaagacggaaccttatataaagattatttctattatgcctgtaaacatcgtcgtctggtagacggtcataaatgtggatatcgtaaacaatggagtgaggagaagattaacaatgcagtggaagaagttattcggaagctggtgaagaatcctaaatttgaagaagcaattctgaataaaattggttcaagaatagatacagaagaaatagaaaaagagattgacggattggaaaagcagcacaggcagctgaccggagcaaaagcaagacttggacagcagatggacagtctggatattatggataaattttatgagaagaaatatcaggatatggagacaaggttataccgtctgtacgatgagatcgaaggcgtggagaacagtatagaggaagttaagaaccgcctgctgaatatccagcaacagaaaatatcagaagaaaacgtctatcaatttcttttatattttgataaactatatgataagttcaccgacctggagaagaaagaatttcttaacagttttgtagaacaggtggacatttatgagcaggagcagccagatggcagattcctgaagcacataaagtttcgttttccggtgtattttggagacagggagacacaggaactttgttgggacaacgaaagtaccgttgagacggtagtactgctttcccacaaaaagccagacggacatatcaacataaaagttgagtttggtgagggtgagggaaaagttccgcttgataatatcgctaaaagagccgaagaatacaagcccaaggaacgagtgacctacaaaatgataaaggagtacatagaagcgaaatatggcttcaaggtacataccgcatatatcgcagaggtaaagagagatttaggcttgccgatgtacgatgctcctaatgcggtagaagaattgaaacagccgaggaagcatccgacagcggaaaaggtagaagcaatcaaagatgctttgaaatattttggggttatttaataggtagcctgtttatagaatatcacatggattagtaaagcaaataaatgatggaaagggtgaggattatgggtggaaaagaagcatcacggggatttttataccaggggtttgcttcagtattagaggccttaacggataaaggtaactgggataagatatatgtcgaatttccaacatcaaatgataaggttgatatagcattagagcagcaaaatcaaattgttaaatgcatacaagtaaaatcaacgataaatacttttaccaaatcagacatcaaaatatggctagatgaccttataaaggatatagaaagtcctgaatatgaattatttttaatcgggcaatgtgataagtccgccaacacatttataaagtcaatcgaaaagtattatgggaaagtgcttgataaagaagcaaaatcgtcgctaaatgggtttgatacagatttgcttgataataagagaatacggttttttattttgccgtttgaaatagaagttttagaaaaaattgtaagagattcgttgcatcagtatatttcagatagcaatcaaatgatgacgtttgaccaaattaggtttattgcttcagcgactgtaaatgatcagatgatttcttcaacacatggtaaaggtattgatagaaaagactttgatgaagaaatggaaaaacgcatttttcttgttgccgataagtattcccctaaaagaatatctattggtgtgaaaagctttacccgtggagcagaaaacttggaaaaagacacagagagttgtttatcattcattaataagtttgatggtcgcaatataaagggtgaatacgattggaacaaagatatttatagaaatttggaggaatttttgctcacaaatacaagcaacaagtatgcatatcaaatatttttagatacacatgcgtctatagcctttgcagcaggaagaattcttgatagtaaatcaggtatcaacgtatttccgatacaaaaatcgtcgaccaatggcactgtattatgggatgtgaaactgtcatctaaaaggaactatactaattgggatatttcccacgaaaagtttaatgagaatcaatatgattctgcattagtattaaatgtcactcgtaacatttacaatgacgtggtaaaattcataaaagaaaacaatctatcaattggatgtatcattaattgtacgccaagcgatgttggtgctacaaatttttcgatagaagatggaacacatgcaactgctttagctaattcagtttataacgctattggcagaagaagcactgtggaacggcgtgcaacactacatatttttgctgctgctccaaatgcatttatgtttttcttaggtcaaaattcagttggatttggcaaatgtattctatatgaatatgattttgagcaaagaaattcttgtacatattcacaatcaataagttttactaattaagggaggattatttatgtctactgtaccgtcatattttaaagattttctatctaatattcgtttgtctgacaatcaagtgaaggatttgaaaacagggcatacgacattaagaaggagattagaggaagatgaaacattatcaaagattattattagtactttcttacagggaagttaccgacgttccacagcagtaaaacccaaaaacggcaataaatcagatgtcgatgtaattgttgtaacgaaattagactctgaagagtttacaccagaggaggctttggatttatttgttccatttttagaaaaacattataaagacaaatatagaattcaaggcaggtcaattggtataagtttaagttatgttgatttggatatcgtacctacttctgcacctggtgaaagcgaaacaggagtacttcaagatgaggcgattatttcggaatatacaattgaagatttccaacaaaagttacttacaaaatcgttcaataatgacttacttaaaagtgcatataacatattttataaatcagataacgaacctcaatggaaatccgaaccgttgctaattcctgaccgtgaagcggaaaaatgggataaaacacatccacttgagcaaattcgatggacggttgaaaaaaacaagaattgcaatacccactatataaatgttgttaaggcattgaagtggtggcgcaaaacacaatatccagatatgaaacatcccaagagttatccgttggaacattttattggtgattgttgtccagatgatattaaaagtgtcgccgaaggtgttgtattaactcttgaaaatatcgtttcccaatacactaataaaccttttttagctgatagaggcgttcctgaacatgatgtttttgcacgaattacagatgaagaatattctgatttctacgatacggtttgtgatgctgctaaaatagctcgtgaagcttttgattgtgaagaattatatgatagtgtttgcaaatggagagagctatttggtaatgaatttccaccagctccaaagccatcaaaatctaattcttcaacgggatttacaacccgtactgaaaaatcggcagctattccagaaggaagatttgcatagatggagtcaaaacaaatccttgataaattaaatcaggctcgaagggctttagattcattatctcaagttgagataatggatgagtggcaatttgataatgaattaaatgtttggtatttacacttaagtattgtgattgaatgtgaaacaccatatttccctcagaaatctcaatggtttttcgttgttggatccgaatacccaaagggaaaaattaaagtatatccagacgtcgaaaacagtataatggttacattgtatcatcaagctaacaactccaaaattgaaagaaacggattgtggagaaaaggagcattatgccttgaggtgaatacaatacctaattatcaattggaaccatatagtgtagatgaacgcttgttgtatcatgcaaaacgagcaatttgttggctagagctagcggcaaaaggaaaattagttacagaaagcgagccatttgagctgcccgaattttctatgagcaatattttagaaatacagtttgctttctcggaagatgtggttaccttcatgcaatgggagagtgtcgaatgtcggtatggaatagcagaattagatgtgtataaaagtaaaccatttgtatactatgttaaggtgtttaaatcgctaagtaacaacatccagcattatacagaatggggaaaatatctttcaaaaacaactatatcacctccaattattgccccgtggatacttatgaatcagatcccagttgttaatgagtggcaagcaccagaaacatttggcgaattgttagttgcctgtgaaaaacaacatattaatataatgtgtatccttcaaaatattgtctcaaaaatacgggacggaaaacggcatttgcttttaattggtttccctgttccccgaatttttggtggagaccccgagataatttcttggaaagctctgtatttaccgactgtatcatatggcaaaaggacagcaaaaggattcagaaataatcaacagggatggtggatgcgtgatagatgtgaggtattcactaaaaatgcaaaattggattggattgtttcagaaaattggaaccaacacgaaatatctcaacgaggtaaaatgagcgacctgttactaagaaaaagaatattgctcattggagcaggttgcattggagcatcaatcgcagaaatatttgtaagagcaggagtatataatattactattgcagattcagatatatttgaagtcgggaacttatcccgccatatcttaaatctaaataatattggtgaatttaaagaattatcggtatgtaattatcttaactccctaaatccacacgcaaatgttaaagttataaatgatactctttcaaatgatgactcttttaaaacaaatattgatttggatagatatgatgttattgttgattgtactggggaaaataatgtacttgatattcttcaaagaactaattttaagagaacccatattatagcttcagtctctgttggattgggtgcaaaacgattatatgttacactgatgaatggtaacacttttaattttaatgctttttataatttgatttccccgtacctacaggcagaaaaaatcttatatgatgattacgacttgccaaggaatggaattggttgctggcatccgacttttcctggaagaagtgatgatatttggattgctgctgcaacttccgtgaaggtaattgaaaattacattatatcaaaatctcaaaagacgctttcactcatttacgagcaaaaagagagcgatgggatatttgaaagctatgaggtggtggagaaaagagagaatggataatttgctttttcaagataagaatcaatcatatagtgtaaagttcgacacaaaggcttatgaacaaatgctttattattgtgctatttctaatccttatgaaacagggggcattttaattggaaattattcttccaaccaagcaatagccaacattttgcaaataacatcaccacccaaaaattctagacattcaaagtgtactttttataggggtatagatggattgaaaagaattttagacttggcatgggaccaaggccagtattatttaggagagtggcactatcatccaaatgcatcgtcggcaccaagtaatattgataaaaatcaaatgatagttttatctcaagaccaaaaactaaaatgtccagaacctatattaattattgttggaggttatcaagacagttggaatataaatgctcggttatttgttaataagcaagaaattattctcaataagcggtagcactagcctcttgataagacgcagatttttgtgtcaaattataagctgtacttgtcgagtgaggaagaattattacgaggattgaaacaggagtatcaatcgttagaagcggaaaagatggaagaagatagtgatattgaagtaatggaaaaaagtaattgtgccataggctgttgcacaattagtatggtgcaaaattagtaccatccatgattttgtgggaaaaggctgcacgaacgggattagtactgtaaaaatattgtccagatatccatagttttgtggggatataatttgaatttgtacgcatgtggagacggtagtcttgatgtcaagaaaagataaataagagccagaaagtggcgtatttccggacctttttcggaagttgggattagaagcccgacctctgaaaaggctcggttgttttatatggaaacatatctactgcgaaaatgtgtgtcaggttgtgacctcggattagataacgcaaattgagtgggttagatgtcagggatttttgagagaattttggaaaacgaaaaaagttgacaataaatcaggcaactcgatactaaaggcattttcggacagtgggatagatgttaaggaaggtgatataaatggacaacctactatgtcttcttgaaaagtatagatgtcatttgaatcgtggaaatagatcaagtgtagattttcttcgagataattattcagagtatatttctgatgtaaaagcggctttatcaccaaaggataatcagctggtaggagcggaaatgtgcaaaatggtttctgagcagatagatactatagagaaaaatgcaagtctgctaattgaagtgttggaattatacaataagggtaggattgttctagcttcgcaaaaagcctttgaagtattcgaaaatatgaaaccgcaacttatgcagaggtattctggcgcttatcgtcaagaagcctattttagaatacgttcagtaaatgacaataatccttttgcattgaacagaaaagagttgttccatattccattcagtaaaaactatttagtgggtactgagcgatatagtatgccggggcatccgtgtttataccttgcttctcaagcggaattatgttggtatgaatgtggaaagcctgaaaaatttgctttatcaagatttgacattcctcagagtgaggataattacatgaagtttatcgacttttcagaaaagttaatgccacttatgcacagtttcttctgctggtttcataatgaagaagacgtagaacaagtaagaaaatatctacttaagtatatatgtacatatccattaagagctgcttgttcaatagtagttgagcatccggggagcagatttgttgaagaatatacaatcccgcaactgttgttacaatgggtattgaatgaccgtgatttcgatggaataagatatgaatcttgcaattcatcagatgaggtcaaatgcttgggaggccataatttagtattggttactaataactttgataaagatggttacgatgttaatcttagagcaaatatcaaagtaggcgaaccggctgttttcgatataaatagcataaatataaatccgaatttgaaggattgtttaatgggacgagacattaaggaagacccttttttgtggggattagaagattctcctaacaattttgaaaaaatataaactggaggatgaactatgatttcagaagaattaaaagcaatagtagataagtttaaagagcaaggaaagatgaatttctttgatgaaacaactgaagaaaagatactggcatttgaaaaagaaaaagaagttacacttccatcaaagtacaaagaatggatgttgttttctgacggaggagagctgtttcttccggcaggtgttcagctatatggaattgagcataagccccttatagatgtaaatgataattcaagaccgagtgatgactatattgttataggtgcatttgcttcaggagacccaattctatgcaaaaaggcagaagaaacaatttctatatacaatcaggaagttggagaaattgatgaagaattggtatatccggactttgtagctttcctaaatgatttatacgaactacttggcataggagagtgattctatggcaaagagtagttttgtagaacgaaacaaagcagttcgtgaagcatggaataaggaacttgaacttgtacaagaaggtaaaggcacaagagagtggacgccggagcagcaaaaggacattcttgaaagagggcgagcttatgatgaaaagggcaaagcttttgaagggcagcatatgaagagtgccgaaatgtatcctgagtatcagggtgaacccggaaatatacaattccttacaagagcagaacattttgaggcgcatgatggcaattggcaaaatccaacgaactggtattataatccgattacaaaagaaaagtttgattttggagatggaccattcatgccatgtgaaataattcatttaccagaaccgatagtgagtattcaattaacgcaggaaaataaaaacaaagaatcactaaaccttgtaaaatctgttaatgagaataaaactgaggatacagtggaaattggagtttcgcatgtaaatacacaaccaaagaatagcaaagaggcaaatttgtcagaggttggttttggacagaacttgaagcgcagaataaaaactatagggaaatctattgtgaaattctctgcaaagcacccaactatgacaaaggtgataaagggagccggtatagttgcggcaactattgtaacaacaaaaattgctgaatctacaaaaagtggagaatttagttcaaaaaatggtctttcatatgataatgaaaatacagattatacaggttatcaagcagatgaagttgaacagaatcgggctgatttagatgagctaaaagctgacaggaaatatgtagatgatccaattgatgtaacagaacatataagaaatttaccggaaggttggcatgcatcagagaaaaagattgctagcgcagctgaacatggatataacttgcagcctggacaaacatgggttgcaaatcatacgaaaaataaagaagaatagagtttgtcaagtaaagtgtgtaagttttttgattttggtgtattaaggcatgatgataagaagtgtttttggacagacacatattattcttcaaaagatgagatggaatcaatttatcaaagacatggattagaaatcgttgaccattttgcgcagggtggtttgactcctcttttagcacaaaaggtagacaagtggaatgaaaaacaattcaggatatggtgtgattatcattatagtgtatgccgtgagcagtccgttttaggagcaagtaaccatgttgtaattattgggagaaaataatatctgtgtttattattatattgtgatactgtttgcttatagaaaatgcgaataggtgataaggttagtttagagtgaggtgttggatatggattatataaaagaaaaactatatcaacagttagcaattgactattgctgtcaggtttcggatataaaggatgataaaatcattttacagaatatgaaaagcttgaaggcaggagacagtttgaagaagcggatgattgtgtcttaaaggtgattgctgtaaacggaaaactgatatttacaggaaaaaagagcattattgaggtatgcaggaagtagtttccaacaatttgggtaactggtttatggatgcctcaaattttagaaaactggatgaaattttaaagaaagatggatacagggtgaaaacagcccatccgtttttcattccaaaggatgattgtgtacacgaaataaagggtgttgaaataaaaaaatacaatcaggaggaaatcctttaatttaaggatgataacaggtttgatgaagcattttgttttagcgaagagtcaccggatgtacttgcagctgcagcaattatagatcatgagatagtcggcatggcaggagccggtgctgacagtccttctttttggcagattggaatcaacgtaaacaagaatttcgagggcaggcatattgccacgggacttgtttcaatgcttaaagccgacattctcaaaaaagaaaccgtgccgtattatggtacaagcttttcaaatcttgcatcacagcatgtcgccgccaaagcagaatttgaggttgcctgggtggaactgattacagaaaaaatggattggtagaaaatttatgcaacgaacaataatgatattcccacagtttgataatattgatgtcattaataagtattagggataaatatgatccttgttatgtagcagtatattgggaattgtttcacaaatatagaagtcataaagatgtttactgtgtgcaattcgaggcggttagaagtgaggctggattgacattggagtatatttgatagggtattacctatttagtcaacaatccttcatagagaagttaatgaaatacaaaggctttactattacggtttttattatcgcttcagccatgaatgttgttttgtatgtgtatataggaaattatgagataataaatgagatttgtaattatatttcctttattgcaggtattccggcactgatttgtataagaaaaatgtatttagatcatacaaatgagatgtacagttattgctcaggattgtcttattacttttacattgttcatttgccggttgttgtattgtgtcagtattttatttcgttaacaggtattggatgtatatataactttgtgctttcttttgtaatatcagtaattataacatgtggcatgtgctttaccttttgcggaggaaaaataatttttgaagtgaaatagcaacgatacggaactgtgtaccacgatgggatttcactcggtaacctacggagataatgacgtcaaggttatagcaatctacattatattttttgccatctgtggcagtgtaggcaaattttgcccacactgaatttttgtctaattcacccctctttgaaaatgttacgtacatgttttactataacactgcggtcacattgaaacagctctgctatctggtctatggacagccatacggtatcttcataaaaggtagtttctatcttggttaagccatctttggttgtgtaaataattatgcttgaatttcttatacaatcagtataacataatggtcagtggctgaaatccatagaatttaagttgtcgattatagaaaaaaagtttatactaagtttggacaatgatacacagaatgagacagtggtctcaatgtcatgaaaagataaataatgaactgaaagtggtgtatttccggactttttcaggtaatggaaatcttttggaaaagctcatttttttatactcaaatgatgtacaaagcatcgagtcaggaggttgcacaagaatactcatttgagatgaatgattacaacagttcaaacgagtttgagattgtgttacggattgcaactttcaggcatgatgcagaaacgttagatgaaataatgcataaggaggtacttctttaaatgcaatatgattggatagatttttacacagagtttgctactaaacttcttcatttcaagaccgatagaaagactcttattcagaaaatatatgcggtgtatgacgcaactggaattagtgttccgaaacttgaaagtggcgatgagattattgatattgatccgtttaccatctttggtacatttaacaaaggaatcacaaatgctaatagaatcgctattcttaatgggattgcgtcagaatttgaaatttctgcaatggtgccgagcaattttgatggaattccggttctcaataatctgaaagcgacattctatggatttaaggatgatagaaaagcaaatgatattgataacctgtggagcttgtttgaggtagctcttgcattggctgataatgacacagaagataatcgccagaaattctccaatgcttatgacaaggtacatgatcagctttgtattcgctggaatattacgatggccctttattggattcgcccttatacatttatcaacttggattccagaaatcgatggtttatatctaatgctcagaatatgccaggcgaatttgttgtagccgctgagaagaaattgaagaaagttccatatgcagcagattatcttgaaataaaggatctgtgtaaaaaagttctggaagcgggacaatacgaatacaagagcttcccagatttatcttatatggcatgggttatctctgagaaagtaaatcaagagaagtctattgaaaaaggaaaaaagacttctaaagcagaatttctcaaatggtttatgccattattacaggcactacgtgatttgggaggatctgcgacaccggtagaggcaagaaagaaaatcattgaaaacgagcatctgtcggatgatgtgataaacgaaacaagaggcaaaacgaaagttaacaaatttgaaaatgaagttgcttttgcaagaaattatcttgttggagcaggatacatcgataagagcgtaagaggtgtgtggacacttacggaagcaggcaagtcagtggagttaacagctgagatggcatcggatattttcaaaaaaggggtctctgatgcaaagagtaagaaaacgaatgatagtgatgctcttgcagatagtgatgtcgatactattcattactggatttatgctccgggacaaaacgctgataaatgggaagagtgttataagaacggttatatgttgctgggctggggcgagattggagatcttggaatattcagttctaaagatgaaatgaaacagcagatgaagcaggaatatggcgatagcagctcttataagaattcagctcatgccacatggcagtttgtccatgatatcaaggttggagacattatatttgcgaagaaaggaaacaatggcattcttggtaaaggaatagttgagtccgactacgaatatgatgctgatcgtacagacgagtattcaaatgtcagaaaagttaactggatcaataagggaaattggacaattaaccatcaggcaccgcagaaaacattgactgatattactccatatagtgattttgtgcaggaaatcaaagacttatttgaagacgatgatatggttgacgacgagcaggaacttacctatccagagtacacagcagaaaatttcttggaagatgtctatatgtctgaagaagactattccagattagttggcttgcttagaaacaagaaaaacattattttgcagggagctccaggggtgggaaaaacatatgctgccaagcgtctggcttattccatgatgggtgtaaaagatatagagcgtgtgatgatggtgcagtttcaccagagttattcatacgaagacttcattatgggttttcgcccatcttctacaggatttgaactgaagaagggagcattctataacttctgtaaaaaggccgagatagatagtgataatgagtatttctttatcattgatgaaatcaatcgcggtaatttgagtaagatcttcggtgagctgtttatgctgattgaaaatgataaacgcggaaatgcgttgcagcttctgtattccgatgagaaatttgcggttccggagaatgtctatatcattggtatgatgaataccgcagacagaagccttgctatgttggattatgcacttcgtagaagatttgctttctttgatatcaagccagggttcgagacgccggggttccgagagtatcgcatggcattagacaatgagaagttcaacaagctgattagctgtgtagagaatttgaacggagtgattgcttctgatgaatctttaggtgaaggattctgtataggacacagttatttctgtaatttacagccagacacaatcaacgatagttggctttatggtgttgtagaatatgaactgatacctttattgaaagaatactggtttgatgaacctatgaaggtgaaagattggagtgaaaatctaaggagtacgattaagtgataccgatacaaaatgtctattatatgctgtcctatgcttttcaggtattgaatgagcaaggctataaaaacattgccacagaacaatttcataatactgctgaattgatggcagctatattagaaaaaggcatcgcgattcagctaaagcgaggacttggtaaagaatatattccacagacggaagcactatcttctctgcgaggaaagattgatattgcagagtccatcaagacacagtcaacgctacggaaacagctaatctgtacatatgatgagttttcggttaacagtatcatgaatcggatcatcaaatctacagttgagatcctcctgcgctcgaatatatcgaaacagcgaaagaagaatcttagaaagttaatgctgtatttcagtgaggtggattttattgatttgtatacagtaaattggaatgttcagtataatcgaaacaatcagacttatcgtatgctgatttcgatatgttatttggtagtaaagggtctgttgcagactcaatcagatggaagcaccaaactgatggattttctggatgagcagcgtatgtgtcgattgtatgaaaagttcattctggaatactacaggagagagtttaaaaatcagattaccgcaaatgcatcacagattccgtggcaattggacaacgacgagaattctatgctgccagtgatgcaaagtgatattatgctccagcgtgatgatagagttcttatcattgatgctaagtactatgagcatagtatgcaggtacagtttaacaagcatacacttcactcggctaatctttatcagatttttacttatgtgaagaataaggaatacgaattgagagagaaggagcatacagtttcaggaatgcttttgtatgcgaagactgatgaagaaatatatccgaataatgtatatcagatgagtggtaaccagattactgtcaggaccttggatttgaatttaccatttacagaaatagcagagcagctagatacaatagcaaaattgcatttcagtttataaaagagacatcctagttgaaaagaaaaaagatgaaataaccatccgttccagcgcagcggaatacttaacctatgttgcctctgtaggtgatcagcaggacagtgttgagatgcgctatgaggatgaaaatatatggctgacacagagaatgatggccacattgtatgatgttgttttaccgacaataaatgaacatattaaaaaaatttatgcagatagtgaattagaagagacggcaactattcggaatttccgaatagttcaaacggaagggtctcgtcaggttacacgtgataccaagcactatagccttcaaatgatcattgccgtaggcttcaaggtcaattccgagcgtgccgtacagtttcgtaaatgggtaaaccagatcgccaaggactacaccatcaaaggctgggtgatggatgatgaacggctgaaacgcggagcgtatctgacagagaagtatttcgatgagcagttagagcgtatccgtgaaattcgtgccagtgaaagaaagttctatcagaagatcactgacttgtatgcgacagccattgattatgataaaagaagtatgtggctgaacataatgccagaattgaagcattttaagatgaatagttaataaagagaggtgcatatgctatgccatgtatactcgtggttgaagatgatgaaaatttaaatcgtggaattacattttcactgaaaaaatccggatatgaggttttttcggcagaatcagtgaaaaaagcgaaaagaattgcaagtgataataatgtggatgttaccatttgtgatgtgaatcttccggatgggaatggactggaatttgtaaggtggatgagatgcaattataatacatacattatttgtcttacagcactagatcaggagatggatcaggttatgggatatgaagcaggggcagatgattatattacaaagccgtttagtctttcggtacttcttttgaaaatagaagcacatttccgccgcagacaggagaaaacggaagccggaaagatgatttcgggagatatcgtatttatcgcaggagaaatgaaagtcctgataaagagtcgtgaaatcagtctgacaaaaacggagttgaaaatgctgactttttttcttcagaatccgaaacagattctttcaaaaacacaaatattggagaatgtgtttgatctggaaggggattttgtggatgaaaatacaatcgctgtcaatatcagaagactccgtgagaaaatcgaagacaatccggctgcaccggtctatataaagaatatcagaggtcttgggtatatatggaatcaggaggtaaggcagtgacaaagagatatcgcaagaagattacagtagtgctctccttggtattacctgtcatattattgtttgcaatattaaattgctttaccacgtatgtgttttatgaagattataaatataaaatgaatcttatgacagagattgctgcaaaggaagaattttccgggctggatgctgtttcggaattgcttaaggataaggatattgaaactaacgaacagggaaggcgattattggagcaatatggatactggggaaataaagggaatgcattttatatgcaattccggcatcaggttatggtgaccggtgctgtaagcactgtgatatgcgtgcttcttttgacttttttactttattggaagaaaaaagaagatgcgtgtcatcagaaaattttagaccagttggaagaaattctgatcagattccgtgaaaataaatttgatgctttactgaaaacggaaaatccagcagaactggaaaaattgaatgaccagcttgaagcaatcggacatcatattcagctgctaaaggaagaagcacggacagaaaaggagaacacgaaagaaatggtttctgatatttctcaccagttaaagacaccggttgcagctttggatacatgttttagtgtgctgatgcagaatgacttaagtgccacagaacaggaggagtttcgtatccgttgtcggagtgctctggatggactggagacattattacagtcgcttcttgaaatatccaagatggaaactggactgattcagattaataagaaaaaacttccgcttatggatactgtcatatctgctgtgaactgtacttatccaaaagcggatgagaaagaaattgaattcgtttttgactatgaaaaagagctggaaacatgtacgattatgcaggataaaagatggcttggtgaagctgtgatcaacgttttagataatgcaatcaagtacagcccggatggttcaaaaatatttatacggttacaaaaaagaaacgatcttgtaagaatggaaattgaggatcagggaattggtattccgcagaatgagtatcacaaaatttttcaacgattttaccgaggaagttccggggaggtcatggaaaagagtggtacaggaatcggactttttctatcgagagaaattatcgaaaaacacggaggtacgattacggtaacctccggcaaaaagaaaaaaggaagcacgtttgtgattcaattaccatatgttggttaaattttaagtgggcagaaatcttacaattctgtaagacttctgctcgttttttgaaagtgaaatgaaagattgtcctgatacaatttggatgtaggttgaaaaatgaccaattatataaacaggcaaagaaagtgtgctgaaaaggtacgctttacagaattgaaaaggaggcagcacatgagtgtgatattagaaaccaagcagctttgtaaattttatggcgcgggtgagaatcaggtcaaagcggtcaatcaggtggacattcagattgagcagggagaatttgtcgcaattgtcggaaagtcaggttccggtaaaagtacattacttcatatgcttggagggcttgacacccctacaaaaggcagtgttactttagccgggaaagatttatacaggatgaaggaagatgcccttgctgttttccgcagaagaaaaatcggatttatttttcaggcatttaatctggtttcatctgttaatgtctgggaaaatattgtactgccactggggctggatggaagaaaagtggatgaagcgtatgtaaatgatatcattgcaactctggggattgaaaaccggatttataatctgcccaatcagttatccggaggacagcagcagagagtagcaattgcaagagcactggtgaatcgtccggaaattatatttgcagatgagccgacaggaaatcttgattctaagaccagtgatgaggtaatcgccctgcttaagatgacagcaaaaaaatatggacagacaattgtaatgattacccatgatgacgaaattgcacaggtcgctgaccgtattctggtaattgaggatggacaggtggtggatttcagatgaagacagtaagcaggattgcatatagcaatgacaaaaataacaggacaagaagtatactgattatgatgtccatatgtctgactacgatgctgcttgtgattatcagtactgtgggaaatggaatgatccgtttacagaaaagtcaggcggcaggctcatatggaagcaattatggtttgtttgtcgcagcagatgccccgcagttaaaggaagtaagccgccgtgcggaaatagatgctacaggcactatgtgcaccgaaggtatcataaaaggcaacgaaaacggtggttttgtctgcatggatgagactgcaagaaaaatgcttccctataataaggaatatgagttaaaggaaggaaagtatccggggggaacgcaggaaattgccgcaggaaaagcattttttagtgaaatgggatatgatgatgtaaaggtcggagatacggttacactggattaccgtgcagggatgcagtcagaatataagccggaagaatttgttgtcagcggaatcctatatgatcgggatgagtataccatcgaggcatcgtatgttgctttcgggtcacaggagttttatgatgagcacgttgcagaaaatgacagacagtataatatttattttactttaaatgattctgcaaatgtatctatgaataatattgattcggttataaagcagatggcagcagcttgtgggatcgaagaaaaaaacgttatagtcaatgatctctatttgcaatgggttttgcagccgagttatgaaacgattgcggtatgcggggttttgattcttgcaattgtacttttctctgttgtggtcatttataatatttttcaggtcggtattgccaacaaggtacaggagtatggaaaaatcaaggctctgggagcgacaaaaaagcagatgaaacaactgatcttcagagagggcatttttttgacatttttttcaataccggttggattgctttttggctttctgattgcaaaatgcggttttaactggctggtagaacagggaaaccttgtatcaacccaaactggctctatgggagttcaaaatcagcaggtgcctctgttttccctgcctgttatgcttctgtgtattttcgtatcatttcttaccgttgctttggcactgcgtaaaccaatgaaaattgtttcacggatttcacctatcgaagcaacacggtatttagaaaatgcagaaacacacaaaaaaggaaaacgaaatggcagaaaaaatgtcaccgtgttttctatggcaatggcaaatgtaacgggtaatccaaaaagaaccattggtactatcctcacaatgggtttttcttgcgtattgtttgtgattatctctaattatgtgggaaatattgacacggagcatgaagcacgtctttccgttaatcatggacaatttgaactgcagcttgactattctgctgagtatgatgaaagatatccggagaataatctggatacgattctgacggatgatccattgaatgattcgctgattgaagaaatcaaaagcattccgggagtaacagatgtcatgacgagagagtgtgtctctgtaaatctgaacggaacaagatttccggctgatattgtgagtaaaaaggattttgattttatgcgccaggacggggatattggctctatggactatgatcaggcggtaaagaatggtgatattttctttggctggtcaacgtggatggaacaagatggatatgctccgggtgaatccattgcatttgactttgagaatggaagtggaacctatacctatcagggaaagattgcaggatcttttgtaagtgcggacacttatcttgtcattccggaaggtgtatatcgttccatgaatctgagaggaacagcctatggctatctgtgggtggactgtgataaaaaagatgtggcatctgtagaacaaagtctgaatactttgatttctaatacttcgcatataaaaatggatacttatcatgcgcagttacaatctgccgaatttgcaagcagcatgatgaagcttggctgttatctgtttatggctattgtaggactcatcgggtttatgaatatggcaaacaccatgatcatgaatattacgacaaaaaagcaggaatatggtatattacaggctgtgggtatgacaaataaacaattaaatttatgcctgcagttacagggactgatttttacggttggtaccatatgcgtagctttgatcattggtctgcctctcggctatgcacttttttcctatgcaaaacataatggaatatttggaatgaatatctatcatgttccaatcgtaccaattcttattatgattcttttgatcggtctgttgcagattgtactttcctgcgttttaagcagtaatctgaaaaaggaaacgctggtagaaagaataaggtatcagggatagccgccaccatctaatgcaaatccctttttcagatattcctttattctgtcggagattaattataaaacattactttacaagaagaataaaaaagcatataattcttttataatatatttaataaaagaggataagaaaacggaaaataaagataaaaaaaatataacaagaaaaaaaataattaattatgttctaaacaatcatgttacatccaaggcgggaatcgcaaaagagttaaacttgagtatgccgactgtattagcaaatgtgaatgacttgttagaaaaaggggtgttggaagaaaatggggaatatgcttcaaccggtggaaggaaggcaaaaagtatagggattaataagtcatactgtcatgcaatgggaattttgattacagcgaatcatatagaaatggtattagtaaatcttggagatgagattataaaaaaagatcgcatccgcttaaaatttacggcagaattatcctattgtacagaggtggcacaaaaggtcaaaacttttcttgaaggcgaattagcgaaggatacgctgcttgggattggagtggcgattccgggaattattgatcagaaagaaaggatcgttttaaaatcacatgctttaggtatagagaattatagtctgcgctttttagaacaggctctggaaattccagtatattttgaaaacgatgctaatgctgcaatgcttgcagaaagaaagcaaaagtatccaaatgcgatatatctgtctttgaaccacaccttaggaggtgcattctgcatagatggaaagctgtttcgagggcagaaccagaaagcaggggagtttggtcacatgatactcgttcccggtggaagaaagtgttattgtggtaaatcaggatgtgcagatgcatattgtgctgcaagtgtactgacacaagataacaggcagtcactggatgcatttatggaaaaaattgaaagtggtgatgaaaaagttttgcagacatggaatgagtatctggatcatcttgctgttttgatatcaaatctgcggatggcatatgatatggatatcatactaggaggtgatgtgggaggtgtattatcagattatatgatacctctgggagaaaaagtgatggcatataatggctttgagcatgatgtttcatacttgaaaaattgttcgtataagaaagaagcgtcagctgttggagcagcgaaatacttttttacaaaacatatgggtgaattgtaaattttttgatcctcatatcatattatagtaaaaaacggaaagaaaacagtaactacggtttcctttccgttttttttgcatgttaattgtgaaaaatgcacaaaaaatagattttgaaattatgaaatatatagaaatatgaaaaaacatattgacaaattgtgtttacaaggtaataatgtaattactttaataaaacaatttataaaacataaaataaaacaacataaaaaaggaggaaacaattatgttacagcaggtaatgacaaatccgggagaaattattttcagagaggttccggttccggaggttaaagaaaatcaggttttggtaaagattatgaatattggtatttgtggatcagatattcatgtttatcatggaaaacatccgtttacaaaatatccggtaacacaaggacatgaggtttccggtgagattacagaacttggaaaaaatgtcacagagtttcatgtgggacagaaggtgacgatagagcctcaggtatattgtggacattgctatccatgtcgtcatggaaagtataatctctgtgaggaattaaaagtaatgggatttcagacgacaggaacagcatctgagtattttgcagtggatgcatctaaagtaacacctattccagaagatatgtcctatgaagaaggagctatgatcgaacctcttgctgtggcagttcatggtgtaaaacagatgggcgatgtggctggcatgaatattgcagtccttggagcaggaccgattggaaatctcgtggcacagacagcaattggaatgggtgcagcgaaagtaatgatcacagatattagtgatcttagactggcaaaggcaaaagaatgtggaattgatgtgtgtgtgaataccaaaaataaagacttcggtgaggcaatgatcgaagcatttggaccggataaggcggatgtgatctacgactgtgccggaaacaatatcacaatgggacaggcaattaaatatgcaagaaaaggaagcacgattgtactggtggctgtttttgcaggaatggcagaagtagatcttgcagtggcaaatgatcacgaacttgacattaagagcacgatgatgtaccgccatgatgattacatagatggaatcagactggtaaatgagggaaaagttcatttgaaaccgctcatctcaaagacatttgcttttaaagattatctgaaggcataccagtatattgatgataaccgcgagacaacgatgaaagtaattatcaacgtcaatgaaaagtaaggagttcgcatggaaaacaaaaatggaaaagtaccgctgatcagtaagattgcatatgggtttggtgatgttggatgtaatttcagctggatgttcgtcagtaattttctgatgatattttatacagacgtgttcggaatcagtatggcggctgtgtcagcgcttatgcttttttcaagattctgggatgcaatcaatgatccaattgtcgggggacttacggataaaacaaaatcgaaatggggacggtaccgtccatggctgttagtagcggcaccaattacagcaatccttcttgttatgacattctgggcaaggcccgactggccacagaatggaaaaatcatttatatggtaattacgtattgtctgctggttttggggtatacctgtgtgaatattccatatggaaccttgtgtggtgctatgacacaggatattgatgaacgtgcaaaaataaatacatcccgttcggttgcagctatgattgcaattggtgtgttaaatattatcacagttccactgctcagcaaattcggcagtcacagtgcaaagacaggatatctgacggttgcggtcatatatggatgtatttttacagcctgtcatttcttctgctttgcgaagacgaaagaggcagtgattattccggaaaaagaaaaaatttctgtgaagatacagttgaaagcagtcatgcagaacaggccatatcttcttgcattggcaggacagatattatttggatttacattatatggtagaaacgcagatattctgtattattttacatatgtggaaggaaatgcctcctactacacaacctattcgatgtgcatcattattccttctatcataggggcagcctgttttcaaccattattccgcaagttgaataacaaaggaagaacagcatctctctttgctttatttacaggaatttccatgttgtctatgtttttcttcaatgccaaagaatcaccggctattttttatgcattatccggtctcacacagtttttcttctctggatttaataccgcaatctatgcaattattccagactgtgtggaatatggggagtggaaaaccggacttagaaatgacggttttcagtatgcatttatttcacttggaaataaaatcggaatggcagttggaacagcacttttagcaggattacttggaaaatgtggttatattgcaaatcagacacaaaatgcaactgtactttcaattatgaaacatgcatttacgacgattccaggtgcactctggattgtgactgcggttgtattatttttctaccggttaaataaaaaacgttataatgagattgtggaggaactgaaaaatggaagaaaaagttgatattgtggcattgggggaattactgattgattttacggaagcaggacacagtcagggtgggagaaaactgtttgaacagaatcccggcggtgctccggcaaatcttctgacagttgcaagtcattttgggtatcgcacctcttttattggaaaagttggaaacgatatgcatggtaaatttttaaagaagacactgcaaacggaaggaatcaatacagatgctatcgtcgaagatccggattattttacaacactggcatttgtggaaatcggtgaaaatggagaaagaaatttttcttttgcaagaaaaccgggtgcagatacacagttaaaaaaagaagaactggatcagacattaatttccggatgtagaatttttcattttggatcattatcgctgacagacgagccggcagaaagcgcaacgatcgaagcagtaaaaatggcaaaagcagcgggtgtacttatttcatatgatccaaattaccgcccgtctctttggaagagcaaagagtatgcagtgaaaaaaatgaagtctgttgtagaactggtagatgtcatgaaagtatcggatgaagagagtattctcctgacaggggctaaaagttatgagcaggctgcagaagaaattcttgctatgggaccaaggctggttgccattacattgggagaacatggcgttcttatggcaacaaaaagcagaaaagaaatcataaaagcatttcagacacatgcagtcgatacgaccggagcgggggattctttctggggaggcgtattatgcagtattctttctataaataagcccgtagaaaagatggaatgggaagaaatcagaaagtgtgctgttttgggaaatgcagttgcaggattgtgtgtgcaaaagcgaggtggaatacctgcgattccgacgaaagaggcagtgtttgaatttatgcagaaataatgagtgtatgttgcaatactggtttctacagcagtttgtgatgtgctgtcataccttgtgaagtagtatctggaaaattgatgattccggcttgacttaatttaacatctcaaatataataattgcatacatcagaaaacgttcactcttcaccggatgagtggttaaagcgtctgggagcaaatcgtaggtgcagtaatttacactgtaagatttgtttccgggcgcttatttattttggaggatagatgcaatatgaataagaaaaaagaattattggtacagattatgtgggagcttgcgggaagcatcttttatgcaataggtatatataacttcgccctgcaggcagagtttcctatgacaggtttttcgggtatttcgattattttataccggctgtttaatatttccattggtttatcaacggttctgcttaatattccggttgcgatactatgctgcaaattgttgggcaggaaattttttgtcagctcaatacgatgcatgcttttgtcttcttttattgttgactatgttgcgccgttatttccggtgtatcagggcgacagactgcttgcggcattgtgcacaggtgtattttgcggaataggctatgccatgatttatacaagaaattcttcaacaggaggagctgattttatcatcatggctgtaaaagcattgcggcctcatttatcgatgggcaacatctcttttcttactgatgtcggaattattctggttggaggacttttgtttcgggatattgacggaatgatttacggcatgatagtgaatatactgtctgcggttgttattgataaaatgatatatggcatgaattcaggcaaagtagcctttatcgtcacaaaaaatggaaagagaatatgcgatgtaattgatgaatgcagtcagcgcggaagcactattcttaaggcacagggaggatataagcaggacgatattcaggtggtaatgtgtgcatgcaacagtaaggaaatgtaccaggtgcgtaaatccgtaaaagatgcagacccggactcttttattgtggttgttgagtctcatgaggtgcacggagagggctttaaaatgacaaatattggagaagcggagaactgaaacatacctgaaacaaatatagtgtgaagattgtattttagcctgaaaaaagctatactaatatagtgatgtagaggttttatggctgaaattatatatttgggaggtaattacatgttagaaaactggattaaaccacaaattccggaggaggaagagctggatgagcgcctgcatgcagcacgctctaagctgtctgttcttcagatgcagattaaggagcatggactgcctgtacttgtgctgtttgagggctggggtactgcaggaaagggcagtgtgctcggtaaggtaatcaagaatattgatccgagatttttcaaggtcgcaaccatggacgagccgacagaggaggaaagacgcaagccttttttatatcggtattttgtaaagattccggcaaaggggaagtttgagtttcttgattcgggctggatggatgaggtagtaaaggacgtactgcacgacaagataggagagaaggagtacaagaagaaaattgaaagcgtgaagcgcttcgagcgacagctgactgacaatggttatcttgttatgaaatttttcttccaaatcagccggaaggaacaaaaaaagcgtattgaggtattaaaggagaataaggataccagatggcgtgtcagtggagatgaagactggcagaataagcattatgacaagtgtatgcatgtgtttgacagatatctgaatgatacaaattcgcctgcagatccttggtatatagttgatgcaaagaatagaaaatgggctgagcttcaggtgctggagacgctggttagtggaatagagacagcacttaaaaacagtaatcttgctgtgccgctgttacagaatgtgttcccgcttgagaagattccaaagctttctgagatatcacttgataaggaactgtctgaggaagaatacaaaaaggaactcaaaaatctgcagtctaagcttagcgagctgcataacaagctatacaggcgaaagattcctgttgtcatagcatatgagggctgggatgcagcaggaaagggtggaaatataaagagaatcacaggggcgctggatccgagaggctttgaggtgcatccgattgcaagtccgctgccaaacgagaaagccagacactatctgtggagattttggaatcgtcttcctaagaccgggcatatagctatttttgacaggacatggtatggcagggttatggtagaaagactagagggtttttgcagcgagaatgaatggcagcgtgcctacaatgagattaatgaatttgaaaaggagctgtcagactggggtgctgtcatcataaagttctgggtgcagattgataaggatacacagctggctcgatttgaggaacgccagaatactccggaaaagcaatggaagattaccgatgaggactggagaaacagagaaaaatgggatctgtatgagactgctgtaaatgagatgctaaagaaaaccaataccacttacgcaccatggcatgtgcttgagtcaaacgacaagaaatatgcgagaatcaaggctcttaagattgtgattgatgcgattgaagctgctttggataaataaaacaaataaaaagtaaaaacagatgtatataaacagagatatgtaaaaaaaagaagccgaaataaatccggcttcttttttaaagtgttggtaaattaatttgggtacaaaaaatgcgcctccaggggctcgaaccctgcacaccctgattaagagtcaggtgctctaccaaatgagctagaagcgcaaacatctgtgtgaatatctgtgtcacacggacaaatgatattatacacagggttttacaaaaatgcaagtactttttaaaaaaaattttaaaaattataaaaatgactttaaaacactaagtactccgttttcccagtaaggcgcacaggtgtgttttgcggctgcgataacttcctggcgggcatttgacacggcgtagctcataccggcattttgaagcatctcaatatcatttagattgtcaccgaaacagcatacttcgtccggaagcaggtcgaatctgtctattaggtatgagagtgcagtccatttgctgacaccctttgcgttgcagtctacccattccttgccggcggctgccaggtgagcttttttattccatgccggaatgaaaaccggtgtacacagctcttcgcatttgtcgggatgaaagacagtgaatttgatgatgtcatttctgtcaagccttgtgatgtcatcaacctcacgcatctcaaagccgtatgaatcacgaagcagatgaaagattgggctgccaccatcctctgcaaagcagaaatcaggagtagcagcaaagtaatcgcatgcaggcagctcatcgcggaccatccggcacatgcccttccatatatcctcgtccataggataggtttttaggatttcctttggagtgcgcacgactgttcctccgtctgttatatacaaaagcttgtgctttataggagcaaacagcttaaattcgcttgaaaactgtctgccggaacagactacaaatattattcctttgtctatgagcctgtcgatgacagacatgtactcaggatctatgagcagtgagccgtcctttacaagtgttccgtctatatctgttgctattagttttatcattatttatctccccgggcgtatatcttttgaatattcaactatatcattataagaaattataatctcatatgcaagggacttatagtgtatttattactgtttgtgaaagaaaaaacagaacaaaaaaacagaatatattgaaagtttcctgctcatattgtatagtagtaatactggcttcatcttcaatgcgttgaagcaatgaaaactaaggggacgatatttactatgatagtagcacttattgaaaaagtttattctttcttgtggggagatctgatacacattccactgcccggcggtgggagcgtgggaatctcactgctcataattcttttgattccgacaggaatttatttcactgtaaggacaagacttttaccaatcagaatgtttccggacatgataaaggcgctgacaggtaaaaaggaaaataaggacagcctgtccacgttccagacactcattgtctctacggcgacgagagtgggcatgggtaatctggttggtgttgtggctgccatatcagtgggaggcgcaggtgcggttttctggatgtggataacagccattataggttcatccacggcttttgtggaggctacactggcacagcttcacaaggagccggatccactgtactcaggctatcgtggaggtccggcgtattacatacaccattactttgaggataaatcaggcaaaaagaaaaaacatgttattatagctgttttgtttgctatatccggactaatctgctggtgtggcataagtcaggttataagcaattcagttacatcgtcatttgaaaatgcatttggcataccacctatttacactaccgtaattttagttgcagtggccgctgtcattgtgcttaggaaaaatgctacggtaaaggtgctggacatagttgttcctatcatggcggtgtgctattttgccataaccatttttatcataattaaaaatataggcatgatgccatcggttttttcaaggatatttgaggaagccttcggtatcaggcaggtggctgcgggaggctttggagcggtgctcatgaacggtgtaaagagaggtcttttttcaaatgaggcaggctcaggctcagctccatgcgctgctgcggcggcagagtgcgatactcctgtaaaggcaggactgacgcaggcgctcggtgtatttatagatacgatagtgatttgcagctgtacggcaatgatcatgctcactgcaccggagaatatagtggcagggaaagagggcatggatttattacagtcagctatgaggtatcatcttggagattttggagttatttttatagcagtcacattgtttttattcagcttttccaccttccttggtatacttttttatgcaaggagtaatgttgcgtacctgtttggggataactggatttcacagaccatgtacaaggtgctggctcttgttatgctgtttgtaggcggtatcgcggcatacacatttgtctgggatctcggagatgtaggaatcggtcttatgactatattcaatacaggtattctctatctgatgggtggacaggcaataaaggagctgcgagtctttgaggagagtaataaagcacaaagcaatagtcaatgctcacagcagggtgataacgtaatgcaataacaataggagatatataaatatgaaaagagaatcatttaaatcacgtctgggatttatactggtaagtgcaggatgcgctataggcataggcaatgtatggcgttttccgtatgtgacaggtcaaaacggtggcggtatttttgtactgttttaccttatatttctggtatgcatgggacttccggtgcttacgatggagcttgctgtaggccgagccagcagaaaaagtgctgtgatgagctacaaggctcttgagaaagagggcagtaaatggcatattcacggatggatagccatgcttggctgctacatgctcatgatgtattatacaacagtctcaggctggatggttgcgtatttctttaaattcctaaagggagattttacatcaggcatgaatactgatgacacggcagctgcatttggaaacatgcttgcagaccccaagcagatggctttctggatgatagttacggttgtgcttggctttttggtgtgcagccgtggtctgcagaatgggcttgagaaaatcagtaaatttatgatgagtgctctgctcttgcttatcattgtccttgcggtgcacagtatcacactttcaggggctttggaaggagtgaaattctatcttgttccaaatctggatgcggtctctgaaattggaataaagaatgtaataacagcagccatgaatcaggcgttttttacgctgagtctgggtgtggccgcaatggagatattcggcagctatatgggaaaggactgcactcttgcaggtgagggtgccaaaatatgtgctcttgatacatttgtagctataatgtcaggccttatcattttcccggcttgcttcagctatggggtggaggtagacgcaggaccaagccttatctttatcactttgccaaatgtgtttgtaaatatgcagggaggccgcatatggggctgtcttttcttcttgtttatgacctttgccagcttttcaaccgttattgcggtatttgagaatatcatgtcgtttgccattgatatgtttggctggtccagaaacaaggctgcgctaataaatggtgtgataatacttattgcaagtatgccgtgtgtacttggatacaatgtgtggagcaatctgcacctcataggaggcagggatgtgcttgacagcgaggactttatggtaagcaatctgcttctcccgattggctcactggtttatctgcttttttgtgtgacaaagtggggctggggctttgataagtatatagatgaggcaaatacaggagcaggacttaagatttcaaggaagcttaagccgtattttcagttcatactgccgcttttaattttgtttatttttatacagggattgatatagttacgtattttttggaaatcagacaggagagtgtaaaatatgttagatcagaatacctttatagagacagtgcagagcgtggccgagattatcaggacatcagcggagccgataggcagagatgaaatcatgtcttattttaaggatatggagcttaataaggcgcaggaggatatggtatttgaatttctcatcacaccacatgagcaggagaatgagagtgcaggcgattatgaggatgaatcacatgaggacgaattacatggggatgaatcgtctgaaaatgctgcattgaacaatgtaatttactcagaaggagattcgatggatgccatagcaggtggaaagaataataaggccaagcaggataatgaagctgagcctgacatagatgaggacagccttatcccggattcacctatgtttaggatgtatcttgaggagcttgaagagatacctgattacacaaaggccgagcaggacgatatgtacaaaaagctgctcgcaggtgatgagagtgtgatacacactatatcaaatttctggctcaaaagtgtgcttgccatggcaaagaagcttgccgttacatcagagggctttgaggacgtagtacaggagggaaacatgggacttttcatgtgccttactgagctctgcggctgcggggatgagatagatgtggaaaaagagcttttggatgccatagaggagtctatgaaagagtgtatcagggagcagaccggtgaggatgagagcgagaatactgttgtaggaaaggtttcattagtaaaccgtgcagtggagaaactaaaatccgataagggttttgagccgagccttagtgagctttcaggctacaccggcgtggatgaggaggagcttgaaaagcttctggagcttatcaaaaaggctgatgtggagaaaaataaacaggacagtaaataatctgtggcatttgtagatttgtgtcatatattaaaccatacctgaatatatgaaaggatggaaaatatatggcacgatttactaatcaggcacagcttcgttatggcaacaatgtagccaattcaaatatagcagtcggagaaatactggaggtgctttctgctacgaaaacagcagtcaaaaacacctacaatcaaaacgatacaataacctatgtggtgagcatcgtaaactccggaaataccgcgataaacggtctgacactttctgacaatctaggtgcttatacctttaacaccaacactcttgtaccattaacctatgtgaataacaccgcaaaatactatacaaacggcacactccaggcagcgcctgcagtaacccagggaccgcctcttagcataacaggcataaatgtccctgcaggtggcaatgcaactgtcatctatgaggcagcgttaaatgagtatgctcctcttggcatagaggctgctgttacaaacactgctacagttagcggcaccggaatcactccggtcacagcagcagagacagtaaatgccgaggctgcaccaaatcttgcaattactaagtcagtaagccctgttcctgtgacggaaaacggtacactgacctataccttcaggattcaaaactacggaagcgttgcggcaacaaacactacaggcgtggttattacagacacattcgctccggttttgaacaatctgacagcggcattaaacggtacagcctggactgcagctacagattatacctacaatgaggcgacaggcacattttcgagcactgcaggtgcaatcaccgttccggcggcaacatacacacaggatagcacaaccggtgcgtgggttgtcacaccgggtgagagcacacttgtcatcaccggaacagtgtagcggcagaggcgattaatacggtttaagaattgtttaatttaagggataaaagttgaaatattgatactaaatatgtaaaataaatatagctatttatggataagatgatgaagatgatcatcggcagtttaaaatgattaaccgggggataagacaaatgaataatgcacagttagtgatagacgaagtaaaaaaggcagtaaagggcaaggatgattgtatcatcaaggcatttgctgcctttttggcaggtggacatatactgcttgaggatgtgccgggagtgggaaagactacgcttgcagtagctttttcaagggcgatggcgcttgtgaatcacagagtacagttcactccggatgtgctgcctgctgatatacttggcttttctatgtatcagaagcagaccggagagtttgtgtaccacgagggtgccgtgatgtgtaatctgtttctggcagatgagattaacagaacaagtcccaaaacacagtctgcgctcttggaggttatggaggaaggaaatgtcactgtggatggaataagcaggaaggtcccggagccgtttatagtgatggccactcaaaatccaaagggcagcgccggtacacagctgttgccagagtcacagcttgacaggtttatgatatgtatgagcatgggatatccttcacatgaggctgagatggatatcgcaaagggcaaaagtgtgaaggctgatgagtatacgataaagcctgttatgaatgcacagggacttgttgagatgcagggagaggttgagcaggtgtttatacatgacagtatttattcgtacattgtggatctggttgatgcgacaaggacaagtccgtacattgagcttggagtgagtccgcgaggtacgattgcgtgtgttaggatggcaaaggcatatgcgtatctgagtgggcgaagctatgtcataccatctgatgtggtttctgtatttgcggatgtgacaaagcacagaatcgtgctaaataccaaggcgagagtatcacatgtatcagagctttcagtgatagatgagatactaaaggttgttaaacagccgacaacttatgtgaaaaaggcaggtaatcgtgattagttttttgataggaataattactgcggcaatagttttttatatgtcgatgatatacggtaatgctgcgttggcactgcttggctgctttatgtgtgtgtttatggtgctgacatttgtagcattgcttgtaaaggcgcaccgggcagtggcagctataaacattccgatagctatcgccacacagggcgagagtatcagggtgagtctttcctgccggctgaaggaggcaggcttcgatggtgttaaataccgtgtaacggtgaaaaataatttatccggcgaaaaaagtacaaaatggctgtcaggaggcagtgattttttgtacagcgtgaacctgtgcggcaattatgaatttgagcttgtaaggataaagctatatgatttttcaaggcttttttatgtcacgaaaagagttaaaaaatatgcaaatgttgaggtgatgccgcagattgatgagattcctgtgaggataacggacagagtaagaaatttctttggggattctgatatctatgatgatttaagaccgggatatgatccatcggagctgtttgatgtcagagagtttcaaaacggtgacaggctgcagagtgtgcactggaagctttctgcaaggactgatgagctgatggtaaaggagaacagcctgccaaaggcatgtgcggtggccatagtagcagatttaagggggataaagaaaggcagacaggcggatgcttttatgaagcttcttgtctcactttccttttcgcttatggatcaaaaatgctctcattatgtggcgtggtatgataccgccataaacgatattgtgagagccagagtggatgacgaggagggcttttacatatttttgaacagttttcttaaaataaagccggataaaaagaatgatgcgctttttttgtatgaggaaaagtaccgggcagaaaagcttgtgtgtctgcttagcgtggacggaagacttcagataaaaaggggagaggagatagttggcagagcggatgaaaaaaacgagattgtcatttaggaaaagcagatggcagaaatctgacgcaaatgagataaagcctgattataataatgcatttacagtgcttggtgtcctgcttactgaacttgtcaatgcagctgcagcagtacttcttacggtgtgtgcagtgtctgttgtgaatactactgtttcacatgtgagatgcccatattatgtgtatgtgtggctgtttattttttcggtgataagcggctttataaacaggcttacatcgcttgatacaagaaaatgggtgcgccatgcgataaatacggggctgctgcttgtatttttgcttggagtgtttattgcaaactggcaggcagcagagcatataaaagacggctttttgtatgtaaagggcaggtatcttgagctgataaatgtgtactatggcacttcatttgtctgtccaaagggagataaagcctttgcgggggcatttgttggctttgtatcgtttatagttatgcttttgctggtgacactggcggttcaaattaaaagaagacgcatgctcacattatttccaacgcttatgcttgtggtgcagctgtgcataggcaaaagcccaagtgtcagcgaggttgttatgctcacgctgtgtacactctggtgtcttatcgcagatggcaacgcacgcacagtggcaggatatgatgcaaatggcagtgcacagggcaatgaggctttaaggatagcggcggtgtttttatacatggcggcagtgtctgcagtacttttcatatgtgtattttcattcaaacctcttgctgatacacttgccgataaaaagccacagatgcttgcctttcaaaaggatttggagggcagcgtaaaatcattcttcagcgtgggaattgatttacaggatggcacggttagtaatcactatccaagctacagtgaaaaaacagtgatgacggtagaagcaaaggcaggagtaccttctaatatttatctgagaagcttctacggtgatacctatgagaatggcagatggattaaaaagtctgatttttccgggatggaaaaagagtatcatgatgcttcaaggatgacagcctggcagactacaatcggattagccacgctgcttgatggttattatgatgatgagaccaatccggctaccgaaaagtatacaatcacgatggaaaagctttccaccaaatacacctatttgccgtactgtatcgacccatacagtatagatgccaagggtgatatagattttgacgaagacttttttatcacaaaggataaaggaacaaagactatcgaggtgtcggcgtgtcccggttttttcgatggtagtctggaaatgtctatccttgagccggagcagcctcttgaggtcaacaatgatttctatgtggcatacaatgattatgtaatggaaaactatactgaaaagcagggcggtgacggaattgttgcaaaagatgcgaagctgcttcttaggacaggacagctcacaagcaatatgatgtacacaggcgatataagagaaaatgatgccaacaggattgcggcagcacaactggtgcagcagtttctgacatcgaaggattttaagtacagcaaaaatcctccttcaacaggcggtaaggatgtagttgataatttcctctcaaatagcagacagggcttttgtgtgcattttgcatcggctggcacgatgatactcagacagatgggcgttccatgccgttatgtaagcggatactgtgcaaaggaggacagcttcaaatccggtgaaaatgatgaggatatatgtgaggtgaaggattcgcagtcgcatgcctgggttgaaatatatctggatgatttcggatggattccggtggagatgacaccgggatattttgagtatgtgacaggtgagaatccgtttgactatattggtgtcaaaggaaagaaaacgaatgccggtgatgctttggatgatactgagaatatgaatgatgctgcggcaaatgaagataatgcatatgaagatgcagcagatcaagatgcagaaaatgaaaatacagatgtaaaaaatgatggcacagcaaacgatactacagcaaacactgcctcaaaccaatatgagtcaggtgatggaagtgagaatgcttatggttcacagtcaggtgcggataaacgtacagctgctcagaactcaaaaacgagacttcatataccaccggtgattttaaaaacctcactctgtgtgatttttctgactgcacttacagccatcatagtttatatcaaaaggcgaagaaatattttgtgggaagcaagacttgcaaaaagggtaaaaaaaggccgttacagcagggcagcaataatgataaacaaccgcatctacaaaggactgggacatacttcaaaaaacaggacagatgagctttatctggctaaccttaaggaaaaatactgcggaccggattattgcggaatccactgggacgagtacatgcgcatcatacaaaaggctgtgtattcatcagagggcatcacaggtgaagaatgctttatggtgatggaaacatggaggcgtctggagaaaaaagacattagacataattcacaaaaaaacatgtataaaaacagcatgattaacaaaaaataaattcgtaaggaaaattgtgttgaaataataaggcttctgtgatataaacttaagcagacgtgttacttttagggaggcatttgtcgtacataacttttaacagggttagtgtatgataagtgcctcctttttgtcgctggagcaaaaagaatgataggtgcaaatcggtacataccctgcatttataggaggaaaagctcatgaaagacaaaatttttggtgtcctgcagagagtaggacgaagcttcatgcttccaatcgcaatccttccggtagcaggcttgcttttaggactcggaagctcattcaccaacaccacaacaattgagacctatggtttacagtggctgctcggagataagactatactccatgcacttcttgtaatcatgaatgcggtcggaagtgccatattcgataaccttccgctcatttttgcggtcggagtagcaatcggaatggcaaagaaggaaaaagaggtgtcagcactttcagcagtcatagcatactttgttatgaatgtatcaatcaatgcgatgctcaagatttccggaaaaatccttgcagacggaagcattgcaaaggatgtgcttgatggaaccatcacatcagtatgcggtatccagtcgctacagatgggcgtgtttggcggaattatcgtaggactgggagtggcagcactgcacaaccgtttctacaagattgagctgccgaatgcattgtcatttttcggtggaacaagatttgtgcctatcatatcaacagtggtatatctttttgtaggaatcttaatgtattttatctggccgacagtgcagaacggaatctatgcactcggcggagtggtgacaggaacaggatatttcggtacacttctctttggtatcataaagagagcacttattccattcggactgcaccatgtattttacatgccattctggcagacagcagtcggtggaacgatggaggttgcaggacatatggtcgagggtggacagaacatcttcttcgcacagcttgcagactcagcaaacatcacacatttcagtgccgatgccacaagatatttctccggagagttcatttttatgattttcggacttccgggagcagcgcttgcaatgtataaatgtgcaaagccggaaaagaaaaagcaggcaggaagccttttactttctgcaacacttgcatgtatgtttacaggaatcacagagcctcttgagttctcattccttttcgtagcaccggctctctttgcagtacaggtagtgctcgcaggaagcgcatacatgattgcacatattttaaacatcgctgtaggacttactttctcaggaggattacttgatttcttcctgtttggtatattgcagggaaatgaaaagacaagctggatgctcgtgattccggtgggaatagtatatttcttactgtattactttattttcagcttcctaataaagaagtttgattttaagactccgggccgtgaggatgacgacacagagacaaagctatacaccaaggcagatgtaaatgaaagaaaagctgccaaggacgtaaagaactctgacgaaaaagcagggtctgtagcagatgagctctcacagaccatatcacgaggtctcggcggcaaagccaatatctcagatgtggactgctgtgcgacaaggcttcgtatcacagtaattgatcccgacaaggtaaacgatgcgcttcttaaatcaacaggagcatcaggagtcgtacacaagggacagggtgtacagattatctatggaccaagagtaacagtgataaaatcagatttagaggattatcttgcgagcgtgacagaggagcatttcgaggatgatgcagcagaaaataatacagcagacgaagatgaagcaaagaacgaaaatgcagcttcagataaagcacaggaatctgatgtgaaagcagaaaaggaagccggcgacgtaaaagagccgacaagcacagtcatcatctcaagccctatgacaggaattgcagcagacctctcaacagcgccggacgaggccttcgccagcaaaatgatgggtgacggagcagtagtcacacctgaggagggggtagttgtagcacctgaggatggaactgttttattcgtttttgatacaaagcatgctttgggatttacaaccgactcaggaattggtatgataatccatgtaggaattgatacagtaaagctcgagggtaaaggctttgacgtacaggttgaggcaggatgccatgttaataagggcgatgtgctcatgaagcttgaccttgactacttaaaggcgaacgcaccatcagttactactcctgtcatctgcacagagctaaaagataatcagaaaatccgtctcatcacagacggacctattaaggcaggagagcctctctacgcagttgacacctacgagaagtaattcttacttcatgataattgaattgtccggttatgttaataataaatagttcgtataaattatcaggagtacattaataaatgtcaggggaatgatatgtacagaatcacaaaggtcttaaatcacaatacagtgcttgcggtaaaggacaagagcgcaagagaatatcttatagtcggaaagggtgtgggttttggaaagaaaattacacagtctgtcgagccaacggaagaggattcactgtatgagctgacccagacaagggacagaggtccggcaaaggacatagtaaaatccatcgagccggagtatcttgagattgcaaacacactgctcgataatgcagagcatgagtttggtcatatagacagaagcatattgtttcctatggcagatcatatagcatttgctgtaaagcgtatggaaaacaaagaacagatcagcaatcctttaaacgatgacatccgtgtgatgttttatagggagtacaagatagctgagaatatacgccacatactaaaggataaaaaacaaattgatataattgatgatgagatcggctacattactcttcatattcatacatccttaaacaattcaaaggtatcggatgccatggagatggcggcagcagttcgaaaatgcgccacatttatagaggaaaagattggaaagcacatagatgtcactactatggcctacaaccgcctcatgaaccatatccgccacatggtatcaagagccgcgaccggagaaaaattaaaggttgatctcaatcagtttatcgagaaaaattatccggagtcattcgcactggcaggtgatatatgtaaggagcttggaaaggacttaaatcatcagtttttggacaatgagacaggctaccttgccatacatatcgagcagattaagtgtgatgagatggtaagtgaataataaaatgtgaaaaccttcctgcacattaggttatgtacaaatctcttgcaatgtggtacactacatagttgtatcaacaaacatccgatacacaaaatacatatgaaatcaatttaaaggagatatatataccatgaaactcggcatcgtcggacttccgaacgtcggaaagtctacattattcaactcactcacaaaggcaggagcgctttcagcaaactatccttttgctacaatcgacccaaacataggtattgtttcagtgcctgacgagagaatcgtaaagctcggagagctctatcacacaaagaaggttacacctgcaacaatcgaatttgttgatatcgcaggtcttgtgaagggagccagtaagggtgagggacttggaaaccagttccttgcaaatatccgtgaggtagatgcaatcgtacacgtagtgcgctgctttgaggatacaaacattatccatgtagatggctctgtagatcctgcaagagatatcgagacaatcaatcttgagcttattttctcggatgttgagattcttgacaggcgaattgcaaagattgcaaagcaggcaagaatggacaagacacttgcaaaggagcttgagcttgttgaggcagtaaaggctcatcttgaggacggaaagatggccagaacctttgaagtgcctgatgatgaggatgcacagctttggttcaagggatataatctccttacagcaaagcctaccatctacgcagcaaacgtatcagaggacgacctcgcagatgacggcgcaagcaatccgcatgttgcaaaggtaagagaaatggcaaaggaagagggcgcagaggtatttgttatctgtgcacagattgagcaggagcttgcagatctcgatgaggacgaaaagaaggagtaccttgaggatttaggtgttgagtcaagcggtctcgataagcttgtagcagccagctattcacttctcggacttatttccttccttacagcaggagaggatgagtgccgtgcatggactataaagaaaggtacaaaggcaccacaggcagccggcaagatacatactgatttcgagcgtggcttcatcaaggcggaggtagtcaactatcaggatcttctcgacaatggaagccttgcagccgcaagagaaaagggcatcgtaggcatggaaggaaaagagtacgttgttaaggacggagatgtaattcttttcagatttaatgtataattttatgaataagacgcttttataagcacaaaatcaaaaagatacgcataagatagaccaagggaggtctgttttatgcgttttctggatttatgcgaaaaagaggttgtgagtgtggaagagggcaggttcatcgggcatgtgcgtgaccttgagtttgacccggtctgtggcaaaatctgtgcgattatcgtgccgggaccgggaaaatatatgggaatattttgcagggattatgaatattgtattccatgggttaagattgtgaaaattggacccgacataatattggtgaatatatgtgagtctgatatgcggcgtaagctgttatgatagtataaaaggaaactattcagtgacattgaaaaaaagtgctaaaaaagtcaaaatcagtacaaaacatattgacaatgaaaattagtatagatatactaaaatatgtataggtctttttaaatacagatgatgatttgaagtattataatgagaaacatagatattttgcttcttcatattatatgatatctacggagggtacagcatgaagtgtccattttgcagtagtgacaacacaagggtaatagactcaagaccggctgatgacaacagctctatcaggcgcagaaggctgtgcgatgattgcggcaagcgtttcactacatatgagaaggtggagacaatcccactcatcgttataaaaaaggataacaacagagagcagtatgaccgctccaagattgaaaagggcgtgcttcttgcatgtcacaagagaccgatttcagcagatacaatctcaaagcttgtagatgaggtcgagatagaaatctttgccagagaggaaaaggaaatctctacatcactcatcggagagctgattatggacaaattaaaggagcttgatgcggtagcatatgtgaggtttgcgtcagtttacagagagtttaaggacgtcaacacatttatgacagagcttaaaaagatgcttgacaccaaatagtgtttatgcagcaggcagccttgaatgaacagattaacagggagacagagaattttatactatgagttttttatacccgggagagtacattgactcgacatacagcatagattttgataaattatataaggagggctacaggggcattatttttgatatcgacaacacccttgtgactcatggttcgcctgctgatgagcgggcgattgctttgtttaagcaccttaaggagcttggtttttcgtgccttgtgctctcaaacaacaaagagccgcgtgtgaagagctttgctaagcaggttgggataaagtatatctacaaggcaggaaagcccaagccatcaggctatcgtacagcaatggagaggcttggcacagatacgaaaaacactctttttgtgggagatcagatatttacagatatcatcggagctaatcttacgggcatcagatcaatacttgtagcacctattgacccgcatgaggagatacagattgtgcttaagcgctttattgaaaagcctgtaattgcatgctacaagaggcatttaaagaaagtaaataaataatttttaactaataatttaaagtttggaggcatatatattatgaagattgcaatcggaaacgatcacgcagcagttgagcttaaaaagacaataatggagtacgttgagagcatgggtcacgaggtgaccaacttcggcacagattcaagtgagagctgcaattacccggagtatggtgagaaggtggctaatgcagtggcatcaggcgagtttgactgcggaatacttatatgcggtaccggtgtaggtatctcaatagcagccaataaggtcaacggaatccgtgcggcagtttgctcagacacagccacagcacgccttgtaaaacagcacaacaatgccaatatcatagcctttggtgagaggattgtaggtgttgagcttgcaaaggatatcgtaaaggcttatctgacagccgagtttgagggcggcagacacgcaaagagaatagctatgatatcggatatcgaggctagaaactaatataaaaccaatacaaattcatgcaatagaaaataaatacttgaaatgtattgctttttattgtaaaatggacgaatgagagagcttaggctcgcacgatttaaggaggaagtaactaatgatttcagcaggagatttcagaaacggtgttactatcgagttcgagggaaacatctatcagattatcgaatttcagcatgttaaaccaggaaaaggtgcagcatttgtacgtacaaagttaaagaatatcatcagtggtggtgttgttgagaagacattccgtccaacagagaaatgccctacagcacacattgatcgtaaggatatgcagtatctttatgcagatgatgatttctatcatttcatggatgttgagacatatgaccagattgacttaccaaaggatgaggttggcgatgctctcaagtttgtaaaagagaacgagatgtgtaaggtttgctcacacaagggcaatgtatttgcagttgagccaccacttttcgttgagcttactgttacagagacagagcctggcttcaagggtgatacagcaacaggtgctacaaagcctgctacagttgagactggtgctacagtttatgtaccactttttgttgagacagatgatgttatcaagattgatacaagaactggtgagtacctttcacgtgtataatctgtatttttatgagtctgcacatattccggtatgcccggagtatgtgcaggcttttttatttgtgtgctgtgtggcaggtgagaatcctgacagcaagtgtcataaacacatgcgacacaagcatagcccacagatatgcatctatcccatagtgggggacgagaagcataatcatcaggattcttatcgcacaggtgagcagattgacgaagagcacctgctttgctttacccagaccgtgcagtatgctgcagagcattccgcttatgtgcatcagtgggcacagaaaacacagtcttctaagaaaatatccacaaagcttggatgaaaaaagaaaatcccctataaaatccgacagcagatagaatatgcatgtaaagataagaccaaagcatagtccgaataaggcacaggagtttatggttttagtgatttttgcatcctttccggcggcattcgcttcagaaacagatggcagaagcatcacgcaggcacagctgcaaagtacaccgggaaataaaagcacgggaagggtgagaccggaaatggttccaaatatgtcaagggccaatgccggtgatagtccgtagagcttaagagttctcgggataagcacattttcggcggaggatgaaaagcttgccaatatgtagtttagtgataaaggaatgaaaagcgcagccatgccataggctgttgttttcaggctcttgacggatattttaaagtatgagaaatccttttttattgtgataacggaaaagacggttgcgctcgcttcgcctgccacgatgccatatatagagtatacaggcttaaagcagctgccaccgtcagatagtattgcgtatatcagatagcaggtgccaatgcgcgcggtctgctcaattaattgtgtggcagcggggatggctgcttttttcaatccataatagtatccgtttatgcaggaatggatagcagcgggcagaattgaaaaggacagcgccttgacaagctctgtacagcgtggctcacttaaaatacaaatgcttatgtagttggcattggaatacataataattgtgagtaaaagagcaatggtggctgacataattattgcacaaatgagtataatctgcctgttttgaggcttttcggcaacaagctttgatgtagcggtctgaaaaccgttgcagcagagtgacatgcatacggacatgagtggaatcacaagctgatagagtccaagacctgttgagcccatgacgttattaagaaatatgcgaaagaaaaaacccataaaccgactggttgtaccggcaagtgtcaggaaaatagttccggtcacaagtggattggataaatatttttttacaatcaaaaaatcacctgtcatatgttgtcttagaagtatatgtgcttccgtggatatatatgacaggtgattatttattgtgtgttaaacagctattttgcgctaaacaactattatactcttatatgaccggtatcgttatattaaatttgtgagattaacccataaagtggcggatagccttggctacgccgtcattttcgtttgtgtcggtgacgtaatcagcctgtgccttaagctcatcggttgcatttcccatggccacgccgatgtgtgcggcttttacgatagccatgtcgttttcggtgtcaccgacagccattgtctcatcagctgctatattcaggatttgagccagcttatgaagtgccacacctttgtcaacgcctgcttttgtgaattccagattaccatagccaccgcttacgagcgtgatttcagggatttttttcagatgctcaaatacttcgtcgcggcagtagtagttatcatttacatcctttggaaaattgatggtcattttctgcatatggtaattgttttcgcgcatcatttcagtgatatcgtttacacgttttctggttgtcatgatgtattcctttatagaaggaggtattttgagatcctttgcatcctcgagacacttgtatggagaatagccacagccgtttatgaaggcatccatatgaacgcgctttgtcatcaggtaatcaattattgaaaacgctgtctcatcagaaaggcagttttcgtaaagacatttttgggtgtcaatttcgtagattgcacttccgtttgcagtgatagcgtagcggatgccggtgcccttaattgcctcaaacggcagccctccgaatggacggccggtggagatgaccacatttatcccggcagcagttgcctcttttatagcttttatattttccttggatatctgacttttgttgttgaaaagtgttccgtcaagatctaaagcaataagtttcataagaaatcctttcttttgtttgaaaaatatagtgttttagtatattatggtgaatagactattgatttttgtgttttaaaatcggttacaatgataatataaattatcacaaatttcaaggatgaagagcacatagcttttgctttgaaatactttacactgtggagtgaataacagctgaaacagaaaaggaaacgaaatgacaagagaagaattcagaaaatatatcagagaaaatatagttatcctggatggagcgaccggtacaaacctgatggcagcgggcatgcctgtaggtgtgtgtccggaggaatgggtgatggagcatccgcaggtgattcttgatttgcagaaagcttatgtcgataacggcacgaatattgtttatgcacctacatttacaggaaacaggattaagcttttagaatatggtttacaggagaaaattaacgagataaataccacactggttggcttgtcaaagcaggctgtcggggatagggcacttgtagcagcagatatgacgatgaccggcagacagctttttccactcggggatctgatgtttgaggagcttttggaggtgtacaaggagcaggcgaggattcttgatgaggcaggcgcagatgtttttgtggttgagacaatgatgagtcttcaggagtgcagagcggcagtgcttgctataaaagaggtaagcgacctgcctattatggtgacactcacctataacgaggatggcaggactctttttggtacaccgcctgagacagcagttgttgtgctgcagtcacttggagtggatgctatcggtgtgaactgctcgacgggaccagctgagatgatagcgctggttgaaaaaatggcagagtactctacagtgcctcttattgccaagccaaatgcagggcttccggagcttgaggatggtaaaacagtatacaagatgactccggatatgtttgccgatgcgatgagagggcttgtgaaggcaggtgcatccattgtcggaggctgctgtggcaccacgccggagcatattcgtgctctcacagaggctgtaaagacaatgcctgttcataagccgcttgagcatcatagaagagtgcttgcgtctgaacgaaagaatgtagagattgacttagatggcaactttactgtggtcggagagagaatcaaccctacaggcaagaaaaagctgcaggcacagcttcgtgagggaaagcttgacctggtgcgccagatggctatggagcaggagacaaatggtgcgggaatacttgatatcaatatgggcatgaatggtatcgatgagaaggagatgatgaaatcggttatatatgaggtttcatcaaccgtggactgccctctttgtattgattcaagctatgtggaggtaatagaggaggctcttaagatttatccgggaagagctctcatcaattccatatctcttgagactgagaagatggaaaaattattgcctcttgcggcaaaatacggagcgatgttcatacttttaccgctttcggatgcaggtttgccgaaggatgtcgaggaaaaaaagcagattataaatactatttatgacaaggcactttcgcttggaatggcacatgaggatatcgtggtggatggacttgttgcgacaataggtgcaaatccaaaggccgcaatcgagtgctatgagaccattgcgtactgcaaggatgagaaaaagcttcctacaatatgcggactttcaaatatatccttcggactgcctgagcgtatgtacgtgaacacagcgtttcttacaatggccatatgtaagggactcaccatggctattgccaatccatcacaggagcttttgatgaatgctgcatttgcatcggatatgctgctcgacagacctgacagcgatatagcatacatcgagcgcatgagcaggcttgcggaggaaaaggcccaatatgagactgttgttgtgaaaaagtcggacaatgatgcgtcggcttcaaacggcacatgcgcagcgggcagtaaggatgcggtatttcaggctgtcttaaaggggaacaagggaagtataattgatgaagtaaagaaaatgctttctgatagtgcaaagcctgacgagattattaataacagcctgattccggctattaatgaggtaggagagcttttcaaccagaagaaatatttcctgccacagcttatcggcagcgcaaataccatgaagcttgctatagagcatctggagccgttacttgaaaagaaggactcaggtgatgatatgccgactcttgtcattgcaacggtggagggcgatattcatgatataggaaagaatcttgtcgtgcttatgcttaaaaactatggctacaacgtgattgatatgggaaaggatgtgccttgtgaggatattgtcaacaaggcgattgagacgaacgcggcagttatcggactgtcagctcttatgaccaccaccatgatgcgcatgaaggatgtagtggaaatctgcaaggaaaagggctgtaagagtaaggtggtaattggtggagcctgcattacacaaagctttgcagacgagataggagccgacggatattcaaaggatgcggcagagtgcgtgaagcttgtggagagacttttgaatagttaaaaatttttttaataaaataaaaaaaagttgttgacaataaggtgctgactgtatataataatcaagtcggttgacgacatgggatcttagctcagctgggagagcatctgccttacaagcagagggtcacaggttcgagccctgtaggtcccatccttttaaaggtatcaatcaaatatggcgaggtggctcaactggctagagcgtccggttcatacccgggaggttgagagttcgagtctctccctcgctactttacttcaacagaagtgacacgggatcttagctcagctgggagagcatctgccttacaagcagagggtcacaggttcgagccctgtaggtcccatccttttnnnnnnnnnngttaagacttgcagctgttgcaggtctttttgttataaatagttacgaaacagaaagggataagcatgataagacctaaaataggacttgactgggatgatgtgacagccccattcaacagcatagccatagatatggcaaacaaaaaatataatatcaccccacctcttgcgctggatgatatagattcctgggagaataccggcagagcctctgtcataaaggaattttaccgggataatacactttacgagaggcagaagcctacagaagagacaaagcggatgataagaaagcttatggatatcggagaggtctattttatcactgcggtggcaccgggcttcatgggagtgagggcgagccagataatggaggcatttcctgatttcccgacagaaaatatcatacttggcaatgcaaaaaatctcgtgcagtttgatattattttagatgatgccatacacaatgtgcttgagacaccggccacatatcctgtgctcatgcgaaagccgtggaattcaaaaatgacaggactgttatcggtcaataatatcacagagtttgtatatctcgtggagcagataataaatgcgtcattatatagaaataaaaatataaagaatccgtcagttgtggcgcttgtcggaccatcaggctcgggaaagacagcgctctcagacagcctgtgcgccatggagcagtttgagaatccgaaaacatactgtaccaagcccggagataagcacaggtacctgacggaggaggagttcaatgcgcaggatttctttgaaaagacaaggtacgccggaatacagtatggcaccaaaatggaggatatagaggcggtgcttgcaaagggacactttgtcgtgatgccgcttgacatgtgcggtgccattgcaatgaaacgtcattttcctactgtaatagtgtatgtggcacgtgacaaggagctcttaatccgggatatcatagaacaggattactcgatagaagaaaagacacttcgtattctgtccatagatgcagagaaacgcaatcgccagatatgtgattatgcagtaaataacatggacgttggtgcagctactagagagctttctgatgttttggaaaacaattgcttataaaatttatttatagcaagctcttagttataagtattaacacttttcctagaaagatgatatgatatgattagttcaagggaacagcatcccggaattaaaattaaaaacaaataacattaacatatcattaataggaggatattaatatgagcaagaaacattatgcagacagaaatttaaaatttgagacattacagttacatgtaggacaggaaacacctgatccggttacagatgcgagagcagttccaatctaccttacttcatcatatgtgttccataacagtgagcatgcggcagacagattcggactcagagatgcaggaaatatctatggcagactgacaaaccctacagaggatgtattcgagagaagaattgcagcactcgagggtggcgtggcagcacttgctgttggttccggagcagcggcactcacatatgctttccaggcagtagcacacgcaggtgatcatatcgttgcagcaaagaatatctacggcggtacatacaatctcttggcacacacacttcctgattacggaattgaggctacattcgtagatccattcgattatgatggaatcaaggctgccatcaaagagaacacaaaagctattgaaatcgagacactcggaaatccaaactcagaggtagtagatatcgaaaaaattgcaaatatcgctcatgaggcaggaatcccacttatcgtagataatacctttgctacaccatatcttgtccgtccgattgagtacggtgctgatatcgtggttcactcagcaacaaagttcatcggtggacacggaacaacaattggtggagttataattgacagcggtaaattcgactggacacagaatgataaatggccatggcttgtagagccaaacgtatcataccacggagtaagctttgcaaaggattgcgcaccggcagcatttgcgacatatatcagggcaattttacttcgtgatacaggagcaacaatttcgcctgttcattcatttatcttccttcagggacttgagacactttcgcttcgtgtggagcgtcatgtggagaatgcactcaaggtagttcagtacttaaaggatcagccactcgtagagaaggttaatcatccatctatttcagaggataaagagcagcaggaactttacaagaaatacttccctaacggaggcggctctatatttacattcgagattaagggtggagcaaaggaagcgcagaaatttattgacaaccttgagcttttctcactgcttgcaaacgtagctgatgttaagtcacttgctatacatccggcttctaccacacactcagagtgcaatgaagcagagctcttagatcagggcatcaagccaaacacaatccgtctttcaatcggaactgagaatgtggatgatatcattgaggatcttgatgaggcatttaaggcacttgcagagtaaacagttttgcatgataaatactccttaaacgaataaatagtgatcattataaaaggaatcggaaaatattgatccggttccttttattgtgccatgaaatatcatggattggattttttcgcgaacatcttgacaaccttttaacaattattgatattcgtgaaaaataagtatattatagtcagtggtgtgaaaccagatatagttttaaataataaataatatacataaaggagaaattatcatgtttggatttggtcagttaatcgaaatattaaagaaagacccaaagaaaatcgtattcacagagggagaggatccacgtatccttgaggcagcttcgcgtttacttgcaagcaacttcttacatcctatccttgtcggagatcctgagaagattagtgcaagcgctgagaagagcggtttcaatatccgtggagcagagattatagatcctatgaactttgaccgtatggatgagatggttgaattattctgcgagcttcgtaagagcaagggtgttacaccggagcaggctaagggaattctttcatcagctaactactttggaacaatgctcgtaaagatgggtatcgcagactcgcttctcggaggagctacatactcaacagcagatacagttcgtccggcattacagcttatcaagacaaagcctggcaacacaatcgtatcttcatgctttatccttgttcgtccatctgcaacaggtgagaatgaggtgcttgcaatgagcgactgtgctataaacatccatcctacagaggatgagcttgttgagatcgcaggagaatcagcagagtgtgctaagatcttcggtatcgatccaaaggttgcattcttaagctactcaacacttggctcaggaaagggcgaggacgttgacaagatgagaaacgcagctcacaaggcaagagaaaaatatccaaatcttccaatcgagggagaaattcagtttgacgcagcagttgcaccacgtgtagcccgcacaaagtgcccacagtctgaggttgcgggtcatgcaaatacatttatcttccctgacatcaacgcaggaaatatcggatacaagattgcacagagacttggtaatttcgaagcatacggcccaatccttcttggactcaatgctccaatcaatgacctttctcgtggatgtaatgcaggagaggtttactcaatggctatcatcactgcagcacttgcataagacatttaatggactattctcattttaataaagaccgctccggtttgtccggggcggtcttttatttgaaaaaagttactgaaaataatatcttggcgcaacagaagaaataaggtatactatagttaaaaactaaaatacagagcaatgacagttgacaataacatgaggtgttgtatctgatagaaagagagacgatatatgagagtaggaatgggctatgatgtgcacaagcttgttgagggcagagatttgattttgggaggagtgaaggttccacatacactcgggcttttaggccattcggatgcagatgtactgttgcatgcgataatggatgcactcttaggcgcagcggcacttggcgatatcggaaagcatttcccggatacagacacggcatatgaggggatttctagtcttaagcttttggagcatgtgagagacctcattgaaaaaaaaggctatgtgatagaaaacatagatgcgacagtaattgcacaaaagccgaagcttcgtccgtatattgagcagatggagcagaatgtggctgatacgctgcaaatcgcaaaggagcaggtaaatataaaggcgacgaccgaggagtggcttggttttacaggccgcgaggagggaattgcatcacaggcaatctgctcacttacaggtctctatgaggcaagtatgcaggtcggaggcggatgcagcggctgcaccggctgtcaggccgattgatttgaatatatatggaaaacatgctaaaataataagatagttataaatcatccaaaaggagatataaataatggagaacaatttcaagttttacaatacactcacaagacagattgatactgttgttccgcgtgttgacggcaaaatcggcatgtatacatgtggacctacagtttaccattttgcacatatcggaaatatccgctcatacatcatggaggatgtgcttgagaaggcacttcgctatgtgggctatgatgtaaagcgtgtcatgaatatcactgatgtgggacatctctcaagcgacggagataccggagaggacaagatgctaaagggcgcaaagcgtgagcataagagcgtcatggaggtggcaaaggagtacacggacgcctttttcaaggatttcacggctgtacacaacaggatgcctgatgtcgtggagcctgcaaccaactgtattccggagtttatccatatggtggaggtgcttatcgagaagggctatgcctattttgcaggaggcaatgtatatttcgatacatcaaagcttgatgattattttgtgttctcttcagcagtagagaaggaacagcttcaggttggagtgcgagatgatgtcgaggaggatgtaaacaagaagaataaaaatgatttcgtactctggtttacacagtctaagtttgaggaccaggctcttaaatgggacagcccatggggagtcggatatccgggctggcatatagagtgctcatgcatcagcatgaagcatctcggagagtacgtggatatccactgtggcggtgtggacaatattttcccacatcacaccaatgagattgcacagtcagagagctatcttggacacgactggtgcaagtactggttccatgtcaatcacttaaatgacagagccggaaagatgagcaagtcgaagggtgcaatactcacagtttcggtgcttcaggagaagggctacaatccgcttgcctacagattcttctgcttacagtcacactacagaaagcctcttgagttttcgtttgatgcgctcgacaatgcagttgcggcatacaataagattgcaaagcgtgtggcagagcttaaggatgagggtgatattgatgaggcagcttttgctgactttaagaagaaatttactgatgcagtttcaaatgatctgaatacatcaatggctataaccatagtgtatgatgtgcttaaggctgatatctcagacaggacaaagcttgcacttatcgatgactttgagcaggtacttgatctgggacttagggaatcaggaaaggccttacttgaggcatcgtcatctgtagacagtgagcttgagacatttatcaatgataaaattgcagagcgtgcagccgctaaaaaggcaaaggattttgcgacagccgatgccataagagatgagcttctggcaaagggggttgccataaaggataccagagagggagtaaaatgggagcttgtatagtatgaagatagactcatatattaaggaacagtttggaataaagcatgttgatataaggacatactcgccgcttacacttgcatatatcggtgatggcatatttgatattgtcatccgctcagttgtggtgggaaaaggcaatacaaaggcaaatctgcttcataagcacacaagtaatatagtaaaggcacatacgcaggctctcatgatagaggcacttttacctcatctgacagaggaggagagtgatgtgtatcacagggggcgcaatgccaagtcaccttccatggcaaaaaacgctacaatggctgattacaggaaagctacagggcttgaggcggtcatgggctatctttatctgaaggatgattttgagagggttgtttcactcaccaagcttggagtggagcttttaggaattgaaatatagcacaaaataagaggaaaatatggataacaacaataaagaaaaatttcatgagaattatatagagggcagaaatgctgtgctggaggctttccgttcgggaaagacaatagacaagctttttgtgcttgacggctgtcaggacggaccaataaagtcaatcacaagagaggccagaaagcatgatgcaatcataaactatgttgcaaaggaaagacttgatcagatgtctgagacaggcaagcatcagggtgtcattgcagtttcagcagcatatgagtatgccgaggtttcggacatactggaaaatgccgaaagaaagggcgagccgccttttatcatcatacttgacggtatagaggatccacacaatcttggcgcaataatccgtaccgcaaatcaggcgggtgcacatggcatcatcataccaaaaaggcgtgcagtgggacttacccctacagtggcaaagacgtctgcaggtgcgataaactatacacctgttgccaaggttaccaatatctcaaataccataaaggagcttaaggaaaagggcatgtggtttgtatgtgctgatatgggtggcactaccatgtatgacttaaacctcacaggtcctataggtcttgtaataggcaatgagggtgacggagtcagcaagcttgtaaaggaaaattgtgatatgacagcttctattcctatggtgggcgatattgactcactgaacgcatcggttgcgacaggcgtgcttgcatatgagatagtcagacagagaattaagagtggaaagtagattacatgtcgcggatgagtggtgtatattatgaattgtatatttatagaataggaagcatatagtggaagattacagcgcatatacggatgaagagcttattatgaggattcataatgacaaaaatgatcatggtgacaacaatgaaatcatggactatatattggaaaagtataagccgcttgtgcgtaaaaagacgaatgcactctacctgataggcggtgagaatgacgaccttattcaggagggcatgataggcctgtttaaagcggtcagagactataagagcgacaaggaagcatctttctacagctttgcacagctatgcatcacaaggcagcttagctcggcgcttgaggcttcaaaccgaaagaaacatatgccgcttaacacatatatatccttttcgcagagtgacagtgatggtacagagtttgaagaaatactgcaagatgatattgcaagtcctgagcagcttctcatagagaaggaaaaatttaaagaatttaaggaacaattgtggaataaactgagtaatatggagaaaaaagtgctacaattgtatctggaaggaaataattatacatcgatagcgcgtatgcttggaaaatcagacaaatcaattgacaatgcactatcccgtatcagacaaaagctaaaaagaaagtaggtgaagcttgttatggagttttcaagaataggtgaacacactataaaatgtgttatttcagaagaagaaatatatgatctgggatatacaatggatgaaattatgagcaatggcgagcgcacccaggaattcatgaaccagatatttgacatggcttcagaagagtttggaactgattttaattcgggaatcaagactgtgagagcagattttttggcggatcacacactttctctgacattttctgaacatcctgctactgagggcatgatggagcatcttaaagatatcgttaatggactgcttaattcgctgccggccgaggctgcagagaatgagaaaaataaaaaaggcaggacaactgcaaaaaagcaggatatggtgtctgttgtaatgttcatttttgaaaaatttgatgtggctgtcagatttgcaaagatgattaaaggactgccaatgccattctcacagctttttaagtttgagggagagtactttatgagcatggatttatcgggctatgatgagcatgagcttgaaaagatgtctgtcatagcagatgagtatgcagatgatatcattgcaggggctgacaaaagggcttttcttatggagcatgcaaaagttattcttgatgacaaggctattgagagtcttgcgcagctgtgaaggtactgaaaagttacaaaaatataataaaaacaaggtctgtcagctatactgacagaccttgttttgtatgtaaatattatctagcttgagctcattgtactttgcaactgcctcattgtctattaaatctccaacagtcagcctgaatgtcaccgtgacaatatctgttccgttacacaactcatccggtatatcagagtttttataaatatcaaaggaaatgtttaatttttttgaatttatgttaaaatagtttcaaaaggagattacattatgggtgaaacagaatattcagaagcattaaaactgggaaaaaaagaatacagggcaaggatagctaaaggacagtttccttatctgccagtacttgatgaaatcttatcagaggcagatattaagacagagcagaatatggggctggtccaggtgcctttggatttcgttgtaggaacaagcaccatgggcaggacatattcatttgcggcaaattttatgccgatattggacgaggaaaccgaatttgcagtgaagtggtctaatctgtcagatgcacagatgaatgagggaatcagagatccaatcaaggcatttgagtacatgaacaggtattatgtgcttgagggcaataagagggtcagtgtactcaagtactttaacgccgttgcgattcctgcaattgtgaccagaaagattccaaagctgtcggatgattatgatgtgaggctttattatgagtatatgaagttcaatgaaatcacggggctttgctcggtggagtttacgaagctgggcaatgctgataagcttctttcgcttgtcggaaaagagggcagatgggatgatgagaccaaggaaaaatttgccaaggtaatgtttgatttttcaaaggtctataatttccgcggtggtgacaggctggacatcaagctgggggatgctattacagtatttatggaggtctttggcatggatgccatgcttgagatgtctgagaatgattacaacaaaaacatcatcaatacatggaaggagtttgcagcagaaggggaaaagcacaagataaatctggtgctggatccgaaaaaggtacagacaaaaaagagtctgttaaactatcttattcctcagactcaaaagaagctcaaggtagtatttttgtatccgagagagccaaagacatctgcatggctgtattcgcatgagcttgggcgtatgtatcttgatgaaacctttccagacaagctggagacagaatatgtggcaggtgtagatgagaacaatgtggagcaggtgcttgaggatatcataaaggcaggtgccgatatagttttctgtgtgggaccgcagatgatgccaaacagcctaaaggtggcagttgcgcatccggaggtttacatactcaactgttcgctgaatgcgccgcatccttatatcagaacatactatggacgtatgtatgaggcgaagtttctcgcgggaatgattgcaggagctgtcacggacaatgagagggttgcgtatattgccgattatccgatatatggcatgattgccaatatcaacgcatttgcacttggagtggcaagcgtaaatccaagggctaaggtgtatctggcatggtcaaagaccaaggactatgacagggataaatttctgacggaaaatgatttgcattatgtatcagatcaagacattattactccgaatgatgcatcgagatactttggcctgtacaagatacagggtgatcagacattaaatctcgccatgcctatatggaattggggagtgttttatgagaagcttttgcagagcgtactggcgggctcctacaaggctgaaggacaggagcaggttaaggcacttaattactggtggggtatgtctgccggtgttattgacctgatttgttcaaagcatgtaccatatggagtgaaaaggcttgcggatcatttaaagagcgatatcacaaagggtgagattgtgccgttctttggacagatatataatcagaagggtgagcttaaaaacaagggtgagcacgagatgaaaccgtctgatatcatgaaaatggactggcttgtagataatgttgtaggtagtattccgcctatgagtgagtttattgacaatgcaaagatggtggttgaactaaagggtgtagagggaaataaactgtaatgaagatactattcttagctgatgaagagtcgaaaatgtactgggaatactttaagaaagaggattttaaaggaattgatattattgtatcatgtggagacttaaacccgagctatctgtcctttctgacaacgatggttggagtccctcttttgtatgtgcatggcaatcacgatgacaaatacaatgtaaagccgccggaaggctgcatatgcattgaggatgagatttacgaatatgaaggtgtacggtttcttggcctgggaggctcaaaccgctataaaccgggagaaaatcagtatactcaaaagcagatgacaaagcgtgttaagaagctgcggtggaagcttaaacgtaaaaacggctttgatgtgcttgtcacacattcgccggcaaagggactgcatgatggtgaggatgtatgtcatacaggctttgatgtgtttaacaggcttattgagcagtataagccaaggtattttgtgcatggacatgttcatatgagttacggcaggcagtttgtcaggcttgacaaggtgggagaaactactgttatcaatgcgtacgagaaatatattgttgaaatatagaatatttctgcaggattaagagtttgtttgtaaatatttaccgaatttaagaaaatatttatcacatggctatatttaggacacaattaagagttactataatatcatcaaaaggagctgttgtatttcaactatgtgttggggtacactcagttccgactaaaaattattcatgtgcacagaattgacgtcgcatatgcttttcctcatatacattgaatgccacaggctttatgtctgtggcattcaatatataaaataactaaattgggaaattcttggaagatttttgggaaaactacctttcaaaacatagatctgatttgaaaaaatgaagtacaaaaaaaccccgaagcctttgattttactggaaaatcttgagcttcggggatttttttataagctgatgacgggaattgaacccgtgaccccttccttaccaaggaagtgctctacctctgagccacatcagcaattatcaacttgttaagtttactatatatatcagcatttgtcaacccactttgaattaaaatataattttatgtgagtcagaatacaatttattatgaattatagtataccataacttttatacttaaaaaagtaaagacatttacctaatgagaaattataccataaaaattcttgaaaatatacccattttgttgtagcatatgttttagtacactttactatgtaaaagttaggagataaacatgaaaaagacaccatttgtgacaaaacaacaggtagaggaaattgttaaaaaattccctacaccatttcatttatatgacgaggcaggcatccgtgccaatgcacaagctgtaaaggatgcatttgcatggaatccgggctttagagagtattttgctgtaaaagctaccccaaacccatacctgctcaagattttaaaggattatgacatgggctgtgattgctcatcatacacagagcttatgcttgcaaagtcatgcggcttcgatggagagcatatcatgttttcatcaaatgatacaccggcagaggaatttgcatatgcagacaagcttggtgctatcatcaatctcgatgatttcacacatattgattttttggaggaaacaatcggacatattccggagacaataagctgcagatataatccgggcggagtgttcacactgtcaaacggtatcatggacaatccgggagactccaagtatggcatgacaaaggaacagctttttgaggcattcaaaattcttaagtcaaaaggcgctaaatactttggcgtgcatgcattcctggcaagcaatacagtaaccaacgagtattatccacagcttgcaaaggagctttttgagctggttgttgagcttaaaaatgagaccggctgcgatattagatttgtaaatctttcaggtggagttggcgtggcttataagccggatcagacaccaaacgatatatcggttatcggcgccggtgtacataaggtgtacgatgaggttttggtaccggcaggaatgggcgatgtggctatttacacagagatgggacgttttatgatggctccgtatggctgtcttgtgacaaaggctatccatgagaagcatatctacaaggagtatataggagtagatgcgtgtgcggcaaaccttatgagaccggctatttacggctcataccatcatatcacagtgctcggcaaggaggatgcaccttgtgaccatacatatgatgtggtaggctcactctgtgagaactgtgacaagtttgcaattgacagacagcttccgaagatcgatatgggagactatctggtaatccatgatacaggagcacacggcttctcaatgggctacaattacaacggacgacttcgctcagcagagatactgctcgaaagcaatggagaggcaaaactcatcagaagagcagaaactccggcagactactttgcaacctttgactgctttgatgatattaaaataacagagtaatctgctagcgcaccttgcagagcacgtgtccgaattttatccatttgctcatatcatcaacattatcgctgtcgacataaaaggtctcaccgtaattgttgattggtgtgagctcacatgggtttttctggtggagttttctgatgtatgcacgcttgttctgtgcgttgataaagataccggtatcgccgtcacggattgggtttcgactgattagaagtatatcgcctttattatatacaggatgtagatgattgcttgtgatgcggattccgatgtgaagggcatcaccgaaggcttttctgtaatttgaaacatcaagcttttcgatattgtaggagtccaaaatcatgccgtcggtcatattgcctgtcgggatgaggacggaaatcagatcctccgtatgactgctttcatccttgtaggcagatagcgcaagctcagtgtctataatcgagtctataagtatgcgttggtttttggaaagctttttgatgcgctttacaaggtttattacatcatcattgaagcctgttagttcgcaggaaaatcgtcctgtcagcttgtatatcaggtaagcggtgtagatgtctatacgagaggattctccgtttgctattcgcttgtaggtggagagtgacatatcaagtgcttttgcaaactgtgcctgggacataccaagctttgtgcgttcgcgctcaatatttgtcgatatgttgtttgctatttcaagtcggttcatttatgagctaatctcccttctttttaaaaaaataaactccaaatttggtcaagtattgacatgcgcaatacactataatggttattgttgaaacataaataaatatataagaaacgtcaattactgtcaaattaaaatgtttgttatataaaaagggaggtgtcctgaaacttaattagtgtaagctgaatgcagcttacactttttttatttaaacaaatgcagctttatttataataaatatcaaaaaaattttttgaaataaatgtgtctgaggcattgattagagcaccgctaattggtacaatgttttattaggtgatgaatcagtattacgaggtctagatataaatgaatgatatagcaattgataaagaacacttacattatttggaacagctgtcggagatgtatccgacaataggcaaggcatcatctgagattatcaatctgcaggctattttaaacctgccaaagggcacagagcactttgtatctgatgtgcatggcgagtatgaagccttttcccatgtgctgaaaaatggttctggggctgtaagaaagaagatagatgatgtatttggtctggcgatgaacaaggctgacaaggctgcgcttgccacactcatctactatccaagggaaaagatggagcttgttaagcaggacgaaccggatatggattcgtggtataagacgactctttataagctgatagaggtgtgcaagaccgtttcatcaaagtatacgcgctccaaggtgagaaaagctttgccggaggagtatgcatatgttatagaggagctcatcacagaaaagccggaggtgttaaacaaggaggcttactacgagtcaatcatcaatacaacagtggagctgggcactgcggaggagtttatagtggtgctttctgagcttattcagagacttgctgttgaccatctgcatgtgcttggcgatatatatgacaggggagcggggccacatctgataatggacaggctgtgcagatatcactcgctggatatacagtggggcaatcatgatattatctggatgggggcagccgcaggaaatcctgcatgtattgcaactgttgtcagaaacagtatcagatatggtaatctggacgtggtcgaggagggctatggcataaatatgcttccgcttgctacgtttgcactgaaggcttacaaggatgacccatgcaccagatttgtgtttaaggtggctccaagtggcgcagataatatggagagtgatctgataaagaagatgcacaaggccattgccatcatacgtttcaagctggagggacagctcattaagaagtggcctgagtatggcatgaaggaacgattgcttttggaacatattgattatgaacagggcactatagagcttgagggcagaacttataagcttcttgatacaagctttccaacaattgacccggctgatccttacaggctgacagagggggaagaggaagtcatacagaggctcagaagctcgtttattcattgcgagaagcttaaaaatcacgttgggctgctactaaaaaaaggcagcatgtacaaggtatataatggcaatctgcttttccacggatgcatcccgatggaggaggacggaagcttcgcaaaggtaaatatctacggtaaagagtatagtggcaaggctttgtttgatatactggagacttacgtcagaaaggcttttttctcggatgataagctggaaagacaaaagggcagcgatatcatgtggtacatatggacagcaccatattctccgctttatggcagaaataagatggctacgtttgagagatattttatagatgacgatgacatgaaaatagaaaagaaaaacttttattatgactatataaacaagcctgagtgtgcgcagcgtatactcgaggagtttggtttgcatgataaaagagatcatattataaacggacatgttcctgttcacagattaagaggtgaaagccctgtgaagtgcgacggcagagtgatagtcatagatggtggtttttcaaaggcgtaccgcaggcggacaggcatcgcgggatataccttgatttacaattcatatgggctgacattgacagcacatgagccgtttgaatcaccggagacggcagtaagggatgagagggatatcgtatcaaggcgtgaggctgtagaggtacttgataagagaatacttgtcggagatacggatgccggaataaaaatgaaggaaaagatagctgatctaaagcagcttattgcggcatatcgttcgggtgagattgcagagcgcgatgattagaaagagggaaaaagcactggatgaaaggcaggatgcaacagagtggacaaaataaagatactggtggtagatgacgagagcaggatgagaaagctcgtgcatgatttccttgcaagggaagggtatgaggtacttgaggccggagacggcgaggaggcacttgatatattttatcagcagaaggacatagcactgctggtgctcgatataatgatgccaaggataaatggttttgaggtatgccgtgaaatcagacagacttcaaaggtgccgattattatgcttacagctaagggcgatgagcgtgatgaattaaacggctttgacattggtgctgatgagtacatttcaaagccattttctcccaagatactggtggccagggtaaatgctctccttcgcagggcgaataaactgggcaaggaggcagtaataagcgaggccggtggtattgttatggacaagacggcacacactgtagctattgatggcaaggatattgaactttcggtaaaggaatttgagcttttggattactttatgagcaatcagggaattgcacttaccagggagcgcatacttgacagtgtgtggagctatgattattttggcgatgcgaggactattgatacacatgtgaagaaattaagaagcaagatgggcgctaaaggcgactatataaagactgtctggggtgtgggatataagttcgagatacagtaagtgttaagcttaggactaatggattcgggataagaggtgtcaccatgaaaaagaaaaaaacgttatccacacagcttacgcttgtgatttcattcattgtacttctgatagtgggagtgttctggatggctaataacacactgctggaaaagtattatgtatttaacaaggaaaaagagatgcttgctgtatacaaaatggtggacttggctgcaaaaaatgacaaactttcagatgatacgtttgctgtagcatttgaaaagaaatgtgttggcgccaatatagatgcggttgtgttcaacaaatacggtaaggtcataattgagggaaccactgacaatcaggaaatattccagctgcttttggaggcgagcatgtcgtcatattcggcagactacaacaacctgaatatgacaaggcagaaggataaaaggctgggaacagagtatattatcataaataacagactgattgacggtaactttgtatacatgaagacaccgcttgagagcattaaggagagcgtgtccatatcgaaccgcttttttgcaataggcacagtggctgctattgttgtgggagtgtttatggcatatattgttgctcgcaacatgactaggccgataagaaatatgactgagctgtcgacaaggatggcgaagcttgattttgatgcgaagtacattgatacggaaaacagtgcaaaggagctttatgtgcttggtgagcatatgaatgagctgtcgcagacacttgagcagaccatcacaagactaaaggtggcaaacaatgaattacagcgtgatataaagaaaaaagaagagattgatgagatgagaaaggagtttttgtcaaatgtgtcacatgagttaaaaactccgcttgctctgatctcgggctatgctgaggggctcaaagaggtcgtaaatgacgatgatgagagccgtaacttctactgtgatgtcatcatggacgagactgacaagatgaaccgcatggttatgaagcttttatctctcaatcatctggaggatggcagtgatgtgcttgagatgacgaggtttgatttgacatcgcttgtcagaggggttatagactcatctaagcttctggcacagaaaaatgaggctgtaattgagtttgaccgcactgattccgtatatgtgagcggtgatatatacaagattgaagaggttgtgacaaactatatcagcaatgcgataaatcactgcacaagaggtggtactatcactgtatcatacagcatgtacagcgaccgtgtgagggtcagcgtgtttaacacgggagagccgatacctgataaggatatagaaaatatatggaataagttctataaggtggacaaggccagaacaagggaatatggcggaagcggcataggactgtctatagtaaaggccattatggaactgcatcacagagggtatggtgtcataaatcacaaggatggtgtagaattctggtttgaacttgagttatttattgcaaataatcaataaatgtgttaccatatgtattattaggataaaagtcatagaataagaacgggtttattacaatgatgggaagaaatataaaaatggcatatgtcgatagttgttgatgccattgctctgtataatatagatgatagagatgactatacactggcactgacacagaaattaaatgaattaggcattaaagaggagacaaaataatatgatagcaatcatcgattatggagcaggcaacctgcgaagtgtggaaaaggctcttacagctataggcgaggagagtattgtgaccagagacaggcatgagattttaaatgccgataaggtaatacttcccggagtcggagcttttggagatgcaatggattcgcttaaaaaatacgagctggacaaggtgattcatgaggtttgtgacatggacaagccatttcttggcatatgcctgggtcttcagctattatttgagggaagcgatgagagtcagggcgttgagggtcttcatgtgcttgatggacagatacttcgcatacctgataaggagggacttaaaatacctcacataggctggaattcacttgatttacagaacaatggaaggctgtttaaaggtctttcagagcatccgtatgtatattttgtgcattcgtactatctgaaagccactgatgaagcaattgtcacagcaacgacagagtacagtacacacattcatgcgtctgtagagaaaaataatgtgttcgcctgccagttccatccggaaaagagcagcacagtcggactttcgatacttaaaaattttgcagggataggggaggcataatatgtttacgaagagaataatcccatgtctggatgtgaataatggacgtgttgtgaagggcataaactttgtcaatttaagagatgcaggtgacccggttgagattgcggctgcttatgataaggcaggtgcagatgaggtggtttttctggatattacggcgtcaagcgacaacagaaatactgttgtggatatggtcagaaaggttgctgaaaaggtgtttataccgttcactgtgggcggcggcatcagaacagtcgatgattttaaggcgctgcttagagagggtgcggacaagatttcaataaattcaagtgccataaacacacctcggctcataagtgatgcggctgacaagtttggcagtcagtgtgtggttgtggcaatcgatgcaaggcgtcgtgctgacggaagcggctggaatgtatacaagaacggaggccgcatagatacaggccttgatgccattgagtgggctgttaaggcaaatgagcttggagcgggagagatccttcttacaagtatggattgtgacggcacaaaggatggctacgatatcgagcttacaaggcttattgccgataacgtttctgttccggttatcgcatcgggtggtgcaggcacaaaggagcatttttacgaggctctgacagagggaaaggcggatgcagcgcttgcagcttcacttttccactacaaggagcttgaaattatggatttaaagaattatctggcagataaaggtgtgtcggtcagaagataggcggtagattgagattatgagtatgcttgacggcgagtgggcaaaggctgtgggagccgagtttaaaaaaccgtattacagggatttgtacaattttgtgagagatgaatatgccacacatgtggtatatcctccggcagatgatatatttaatgccatgcattttacaccacttaacaaggtaaaggtactcatcctcgggcaggatccgtaccataatgtcaatcaggcacatggattgtcgttttctgtgcttccgtctcagaaggatattccaccatcactgcagaatatctacaaggagcttaacgatgatctggggtgtgatatccccaataacggatacctgaagaaatgggctgatcagggtgttttacttttgaatacggtactcaccgtcagggctcatcaggccaactcgcatcagggacacggctgggagaagttcacggatgcaatcatagaggctgtaaatgagcaggacagacctatagtgtatatgctctggggccgcccggcacagtcgaagattcctatgcttacaaatccaaagcatctgatattgacagcaccgcatccaagtccgctgtcggcttacagaggcttttttggatgcaagcattttagtaaagccaatgagttccttaaggagcatggagtggagcctgttgactggcagatagaggatatataaaggatgacaataccggctcatatgttggtaataccggcagatatcaattcaaagtcgcttgcgaaggtgggaatcacagtggatataattataatatgtttttatagttgcagacaggatggaaattcctatcttactttgtgacttaacagaaaaagaagcatcccggcttgggatgcttcttttaattataattagcgtttagttgtcgttttcatcgtcctcgctcattgagtagacctgacgcttacgtgccatctcatcgctctcaagatattcgtcgtaggttgtgatcttgtcgatcattgaaccgtttggcaggaattctatgattcggttggcggttgtctggactacctggtggtcacggcaggcaaagaggattactccagggaattttatcattccgttgtttaatgctgtgattgactccatgtcgaggtggtctgtaggctcatcgaacatgagcacattgcttcccatgatcatcatgcgggatagcagtacacgaaccttttctcctccggagagtacacgcattttctttactccatcctcaccggcaaagagcatacggccaaggaaacctcgcacatatgtggcgtccttgatttctgagtactgtgtgagccagtcaacgatgagctcatcagtatcaaagattgcggtattgtcctttgggaagtatgactggctggttgtgacaccccatttatatgagccctcgtcaggttcaagctctccggcaaggattttaaacatagttgtttttgcaagctcatttcctccgacaaatgcaattttgtcatcgtggttaacagtgaatgagatattgtcaagtacctttacgccgtcgatggtttttgagatgccctcgacaaagagcacatcgtttccgatttcacgctcaggacggaaatcaatgtatgggtatttacggcttgatggacgtatttcatcaagctggattttttcgagggcacgctttcttgatgtagcctgctttgatttagaggcattggcagagaaacgctggataaattcctgcagctccttgatcttttcctctttctttttgtttgcttccttcatctgacggacaataagctggcttgattcataccagaagtcatagtttcctgcgtagagctggatcttaccgtaatccatgtcggcgatgttcgtgcagaccttgttgaggaagtatctgtcatgggatacaacgatgaccgtattctcgaaattgatgaggaattcctcaagccatgagatggcatcgaggtctaagtggttggtaggctcatcgagaagcagtatgtcaggatttccaaacagtgcctgagcgagaagcaccttgacctttattgcacccggcagatctgccatcagagtgtagtgatcctcagtaggtacaccgagaccgtttaagagagtagctgcatccgactcagcattccagccgtccatatcggcaaactcagcctcaagctcgctggcacggattccgtcctcgtctgagaaatcctctttcatatagatggcttccttctccttcatgatatcatagagtcgcttattacccatgataaccgtatcaagtactgtaaactcatcgtacttgaagtgatcctgctgtaagaatgacagtctctgtcccggagtgattgcgatatcaccgtttgtaggctcaagctgtcctgagagaatctttaaaaatgtagacttgccggcaccgtttgcaccaataagtccgtagcagtttccctctgtgaattttatgttgacatcctcaaataaagcttttttaccaattcttaatgtaatattgtttgcactaatcattttgtctttattcaatcctttcctatttaataacctgttcgtttctgtaacacatcgtttctattttaacgtaaaaccagtattttgcaagtgttttacaggcgatttatagccattgtgcccttttgtacataaaatttaccttgttaataaatattttaggatttttgtacaatgtattgctaaaaaaacttgattttttacagcgcacaaactaaactattatgtagagacattctgattcatgtctataattgaacatttattttacaggaggaaatatcatgtctagagcaaaacagtcgatggatggaaataccgctgccgctcatgtagcatatgcctacacagaggttgccggaatctatcctatcacaccttctagcccaatggctgatacagttgatcagtggtcagcagcaggacagaagaacattttcggaagcactgtaaaggtagttgagatggagtctgaggcaggtgccgctggtacagttcacggatctcttgcagctggtgcacttactacaacatttacagcttcacagggacttttacttatgatccctaatatgtacaaaatcgcaggtgagaatcttccttgcgtatttgacgtatcagctcgtacagtatcttcacatgcactgaatatcttcggtgatcacagtgatgtatatgcttgtcgtcagactggtttcgcaatgctttgtgagacaaatccacaggaggttatggatctttcaccggttgcacactgtgcagcacttgagggaaaggttccattcattaacttcttcgatggattccgtacttctcatgagattcagaagatcgaaaagtgggattatgaagatctcaaagagatgtgtccaatggatgcagttgctgaattcagagcacacgctcttaacccagagcatccagcagctcgtggatcacacgagaacggagatatcttcttccagcatagagaggcatgtaacaagttctatgatgagcttccagcagttgttgagaagtacatggacaaggttaatgctaagcttggtacagattacaaattattcaactactacggagcacctgacgctgatcgtgtaatcatcgctatgggttctatcaatgatgtagctgaggaagtaatcgattacttaacagcaaagggagagaaagtcggacttattaaggtacgtctttaccgtccatggtcttcagaggctcttcttaatgctattccaaagactgcaaagaagatcgctgtattagaccgtacaaaagagccaggatcacttggtgagccattatacttagacgttgctacaacacttcgtgaagcaggaatgaacgatgttgtattagtaggcggacgttacggattaggatctaaggatacaccaccttcttcagtatttgctgtatatacagagcttgagaaggatgctcctaagcacagatttacaattggaatcgtggatgatgttacaaatctttcacttccagaggttaagccagctcctatcacatctgcacctggtacaaaagagtgcaaattctggggtctcggcggagatggtactgtaggtgctaacaagaactctacaaagatcatcggtgaccacacagacaaatacatccaggcatacttccagtatgactcaaagaagactggtggtgttacaatttctcacttgagatttggtgacaacccaatcagaagcccatactacatcaaccaggctgacttcgtagcatgccacaaccctgcatatgttatccagggcatgaagatggttcaggatgttaagccgggcggagtatttatgatcaactgccagtggtcagatgaagagcttgctcatcacctcaacgctgacgctaagaaatatatcgctgacaacaacattcagctttacacaatcaacgctatcgacaaggctattgagattggaatgggtaagagaactaacacaattctccagtctgcattctttaagcttgcagatgtaatgcctatcgacaaggctgttgagtacatgaaagctgctgctaagaagtcatactcaaagaagggtgacgcagtcgtagagatgaactacaaggctatcgatgccggtgttgacgctgtacataaggtagaggtcccagagtcttggaagaatccagaggcagatgctcctaaggcagagcgcacaggacgtccagaggttgttaagcttgttaacgagcttcttgatccaatcgctaagatggatggagacagccttccagtttcagcattcgctgacaaggcagacggacagtatgtaacaggtgcttctgcatacgagaagagaggaacagccgttacagttccacagtgggatccagagaagtgtatccagtgtaacaactgtgcatttgtatgttctcacgctacaattcgtccattcttacttacagatgacgaagtaaaggcagctcctgacaacatgaaggttgctgatatgaagccaaaggcaggcgcttacaagtatacaatgagcgtatctccacttgactgtatgggatgtggtgagtgtatcacagtttgtcctacagcagctatctcaatgcagccacaggagtctcaggcagcagagcagccagtatttgattacttagtagctaacgtttctaagaagacagatgcaggaatggttgatacaacacctaagggatcacagttcaaccagccactccttgagttctcaggctcatgtgcaggatgtgctgagacatcttacgctagacttattacacagctcttcggtgagcagatgtacatctctaacgcaacaggatgttcttctatctggggtaacccggcagctacatcaccatacacagtaaatatcaactctaagaagggaccagcttggtctaactcactcttcgaggataatgctgagcatggtttaggtatggaagttggacagagatatctccgtgaccaggctatcgagcttgttaaagagatcgctgcatcagacaaggctacagctgagttcaaggcagcagcagataagttccttgagacaaaggatgacacaaaggcaaatgttgagccaacaacagctcttatcgcagagttagagaaggcagcagcagccggatgtgagaaatctaaagaagtacttgctaagaaggattacctcggaaagaaatctgtatggatcttcggtggtgacggatgggcatatgatatcggtttcggtggattagaccatgtacttgcttctggtgagaacgtaaacgtaatggtattcgatactgagatgtactctaacacaggtggacaggcttctaaggcttctaacatcggtgaggtatgtcagttcgcagcagctggtaaagagacaagcaagaagtcactttcagagatcgctatgagctacggatatgtatacgttgcacagatcgctcttggagcaaacccagcacaggctgttaaggctattacagaggctgaggcttatccgggaccatcacttatcatcggatacgcaccttgcgagcttcacggtatcgctaagggtggtatgaaccactgccaggatgagatgaagaaggctgttaaggctggatactggaatctcttctcattcaaccctgcactcaaggctgaaggaaagaatccattcactcttacatcaaaggccggcgacggatcttaccaggagttccttaacaatgaggcacgttatactcgtcttatcaagccattcccagagagagcagagaaactctttgctaagtctgaggagacagctaaggcacgttatacacaccttgagaaactcgttaaattatacggagaggactaattcattagtcacagtatatattttatcccacagggcatatgctctgtgggatttttgcttattatcctgtgattaccctatatttcgtggttttttgtttacaaatacaacatgtaatggtacaatacttacgttaatggtatttaatggaaccatcggagggatacgaatgtcaggcatattcgatagacgtgcaaaaagatttatatctacagaacaagcggagcgggcagtaccttcaagaacagtaatggcatcccgtgtagcaagagacgatgtgaatcgtagtgaaagagtgcagaaaaaagagaataatatacaaatggataaagatgattttttgttaacacaaattgatgagtttcgtgaaaaggcaaaacgtcttcaggagatgcttaatacaaaagaatcaaaagctgaggagctttcagtcatagttgaggagagggaagctaaggcagaggagctgcagcagatacttgacgagagacaggaaaaagccgatggaatcactgcacaggttgctaagcagatagatgtgcttatagaaagtgttcatgaaaagatggctgagatagagcaatctatgaatgcaggcatggacagcttaggccgtcaggtaagctcagatatggataatcttggtagttcggtgtccggacagattggaaatctcggacagtcacttggcactgagatatcaggtatcagccagaatataggccagagtcttgattttggtgacacattagagcagacaaggcgtatcacagaggagggcacagcagcagttacatcagcggtaaatgaggcgaatgcccatatgcttcagtcgcttaaagaacttaatgatcagcttgtttcgataaaggcggagttgtctgacaaggtacatacagagaatgttaagtgcttcaggaatattcaggatctctttaaggtaatgggagacaaggtggacacagtgtcagagcttgagaagcaggtaggaacaacaaagacttttgcagtcatctctacggtgttggctattatcaatacatttggctttgttgtaatcgcattgtatatattcgggttctttggttcgattttttaataaatattattgtaatagggtggtgcagttcccggttagggagttgcaccatattttgacattttataaggcagacagagaggaaaactaaatggcaaaaaagattgtaagagttgttggacataaaaatcctgacacagattctatctgtgcagcaatagcgtatgcaaaccttaaatcacatacagatgatacaatggaatacataccaatgagagcaggaagcatcagtgcagagacagcatttgtgctggattattttaaggccgatacgcctgcccttttaaaggatgttggcacacagataaaggatatacatatcagaaggactgagggtgtaagcagtaatctatccatgaaaaaggcatgggagatgatgaagatactcaacgtagtcactcttccggttgtcaataagaaggacaagcttgaagggcttattgtgacaggtgatatagcaaagtcatatatggatgtgtatgacaattctatcctggcaaaggcgaggacccagtacaggaatattgtagagacgctggatggcaagatagttgcaggcaacgagcatggctattttgtaaaaggaaaggttatagtcggagcaggtacacctgatacaataaagggcaatgtggctgaggatgatctggttatcatatcagaccgtgaggagtcacagcttatatgtattgaggcaaactgcagctgtataattgtgacaagtggcttcgatatatcgaaggatgtcataaatgctgcaaacgctaaggatgtggtagtgataagtacaccatatgacacgtttaccacatcgcgtctgataaaccagagtatgccgataaaatcatttatgacaagggaaaatcttattcattttgatttggatgattatgtggatgatgtgcgtgatactgtttcaaaaatccgacacagggatttcccaatacttgacgaaaaccaaaattatgtgggtatgttttcacgcagaaatttaatgaatgcaaggaaaaaacaggtgatacttgtggatcataatgagacctcacaggcagtggccaacattgatgaggcagagattcttgagataatcgatcatcatcgaattggttctcttgagacaataggacctgtgtatttcagaaaccagccgcttggatgtaccggaaccatcatctatcagatgtatatggaaaagggtgtggaggttactcctcagatggcggggcttatgtgcgctgcaatactctctgacacactagtgttccgttcgcctacatgtacccaggttgataaatctacagcacttatcctagcggagattgcgcagatagatgtagaagagtttgccaagaaaatgtttgaggcaggcagtaactttgctaacaagacagaagaggaaatattaaatcaggattttaaaatctttcattcaggggattatacgtttggagtatcgcagatttctgctctttcgaggacagagctcgataaggtacaggcaagagtggtgcctctgcttgacaagatgcaggtggaaaaacagcttgatatgctctttgttatgctcacggatatacttaatgagtctacatatctcatctacagtggtgcagaggcagcgtcaatagcagcttcagcatacaatctgccacagagcaaggatggaattatgcttaagggagtagtatcgcgtaagaagcagctcatacctgagcttataaatgtgattaatgagagataatgcagcactaaaaataattaaaagcttcctgtgatatatcatgaagcttttatgtatttgtaggggtagaatggaattgcttgcggtatgcacggataaatgaggaatagcttccgaatccacaggcatcgcaggcggcagacacactgcttccgtcgcgaatcatatcgcgggcgagcagcagacgctttgttgtgatatatgaacctatggtgcagccggtttcttccttgaaggtgtgcatcaggtgatacctgctcatatagaatttatctgccagttcatcaatacttatacggtttgttaaattcttatttaagaaatccaaaatctctacaatttttttgtttgaggaaaatgtgttaatatattctataccgccatgcagggtgatacgattgagctgtatcagaaactctaaaaacaggagcttctggtacagctcatttgcgtattcattggtttctctaagtgtagagtctagtcccctgattgtatcagccagacggctgcccttggtcgcagcgagtcttagtacatgtgactggttagcataggcctgcttgaaacagcatgccagatcatagcctttgctcacataatcgtcaataagctgcggtgacacatatataatgattctttcataaattgaatcgtcatttaatattggcttatgaacctcaccggcattgacaagcacgatatcatgttctttgagctcatagctgcggccctcaatgcagtaggatacattgccgtgcagatgaatcagaattttgtggaaatcatggtaatggaaatctatatttagcttgtgttcatctcttagatgaaatattttaaaaggctccgtcaggtagcctgcttttgtataatttgaatccatgatatgctcctttgatgataagatgttactataagcataatctataacagcacaaaacgcaacataaaacgcacaaaatgctatagaaaaaccagaaagtgcgctgtataatataattaaagtaactattcagaaccactgagaacaagcaaagctgatgcatcgtgctcgcatgtaagcagcagatttgcttgttcttaaggtggctcgaatagagccacccccacacatatgagcaaaattagctgcgtagcagtgaccaagcacgagtatcgtgcggttttgcgaatgtgcgtgggatggttctgaatagttaccaatataaaaccaataacgaggtgatcactatgaaatttacaaaaatgcacggctgtggaaatgattatgtatatgtaaacctttttgaggagaagttggatgacccggcaagggtgtcaatatatgtcagtgacaggcattttggaataggctcagacggactaatcacaataggtccgtctgacaaggcagattttagaatgaggatatataatgcagacggttcggaagccgagatgtgcggaaacggcatacgctgcgtggcgaaatacgtgtatgaccacaaacttactgacaagactgaaatatcggttgagacaggagcaggcatcaagtaccttacactatatgttgaggaaaataaggtatcacaggtgcgcgtggatatgggtgagcctattctgacgcctggggatattccggttgtgaaagcagacggaagtgcttatggtgatgactacagggtaatagatgaaccgatttcagcaggcaatagagagtggcacatgacctgtgtttcaatgggaaatcctcatgcggtagtgtttgtcgatgatgtggcaggttttgagcttgagaaatacggtccgctttttgagaatcataagatgtttccaaagcgtactaacacggagtttgtagagatactttcaaggaatgaggcgaaaatgagagtatgggagaggggcagcgctgagacatgggcctgcggtacaggaacctgtgcgaccgtcatggcatgtatactcaacaaaaagactgacaacaaggtgcttgtgcatctaagaggcggagatctgactatcgagtatataccagagaccaatcatgtgtttatgacgggacctgctactgaggttttctcaggagaaattgatatcatataaagcacaagtattgtgcggtttggcgaatgtctgtggttgaatagttacaaatctttaagaaacaaaattaacagaaaatatatatcaaaatataataaaatatgggagaaaataaaatgaagcttgaaaaattacttgaaagaatggattataaattattagcaggaagcacagatatagagatttccacactcgtgtatgactcgcgcaaggtggagaaggcatcggtatttgtgtgcatatcgggagctgtgtcagatgcacatgattttatccctgatgtggtaaagaaaggtgcagcggcagtggttgtcgaaaaagatgtgactcctatcgaaggggtgacatatattaaggtagatgatacaaggcttgcacttgcgtgtatgtcagcagcttattttgattatccggccgagaagataaagactatcggtattacaggtacaaagggtaagaccactaccacatatatggtaaagtcaattcttgagtcagccggcataaagacaggacttatcggtacaatagagtctatatgtggtgacaagagaattccgtcagcaaataccacacctgagtcatacagagttcaggagctgtttaaggagatggtggatgaaggccttgatgcagttgttatggaagtgtcatcacaggctctcatgcttcacagagtatcgggctttacctttgatattggtgtatttacaaatcttgagcctgaccacatcggagagcatgagcacaaggattttgcagactacatgcattgcaagagccttttattcagacagtgtaggcttggtatctttaacggagatgatgagcacttagagggtattatgaagggacacacatgccaggtggagacttacggctacaagtccacaaacaacctggtagcagaaaatgttgagcttaaaaaggagcatggagcactcggcattaaataccatgtatcagggcttctggattttgatgtggaggtcaatgtgccgggcaaattctcagtatacaattcactaacagccattgctatctgccatcatttcaatgtggataaaaaggcaatcggggaggctcttcatcatgtgagtgtaaagggcagaatagagattgttcctgttacaaagagatatacccttatgattgattatgcacacaatgccatggcacttgaaagccttctcaccactcttaaggagtatgagccgggcagacttgtatgtctgtttggctgtggcggaaacagggcaaagtcacgccgttatgagatgggagaggtgtcatcgagacttgcagaccttaccgttgtcacatccgataatccaagagatgaggagcctatggacataatcaatgatattttgcagggtgtacacaaggcagatggagagtatgtgacaattcctgaccgtaaggaggctatcagatactgcatggagaatgcccaggatggtgatatcatagtacttgcaggaaagggccatgaggattatcaggagataaagggtgtaaagcatcacatggatgagagagaattaattgctgatataataaaagagaaccctgacatcagactttaatattttagtataggttaaatagtttagtataaaatagttcagtaaaatagtgtatttgggaggtatatatgtctctgtttaagggcgccggagtagcgctaattactcctttcaatgaggataacagtgtaaactatgaaatgcttaggacactggtgagaaggcagatagacggtggcactgatgcaattatcgtgtgtggcacgacaggtgagcctgccacaatgacagaggaagaaaagctttcggtaataaaatgtgtggtagacgagacagccgggcagattcctgtaatagcgggaacaggtgccaactgcacacaaaatgtgatagatttctcacagaaagttgaaaagcttggcgtagatggtctgcttgttgtcacaccttactacaataaagccacacagaatggtctttatgcgcactatgcagcgatagcaggggcggttgggcttccaatcattatgtacaacgtaccatcgcgcacaggatgcaatatacttccgcagactgcggcaaggcttggcagggattttgaaaatatagtaggaatcaaggaagcaagtggcaatatatcgcaggttgcaaagctaaagaagctggcaggaaatgacctcgatatttattcgggaaacgatgaccaggtcatcccaatactctcgctcggtggaatcggtgtgatatcagtgctgtctaatgtaaggccggctgcagtgcatgacatggtaatggaatacctgaatggaaatattaaatcagcacttgatatccagcttaaatacctggatttaatagaggcactgttttgtgaggtaaatccgattcctgtaaaggcagctatgaagcttttgggatatgatgtgggaggacttcgtcttccgctcacggagcttgaggatgcaaacagggcgaggcttaaagaaagtatggaaagtctaaaggaaaattagtggataaaaaaggatattaaagaaaaattaaaggataaattaacatatgggaaaacaaaactggaagccgggcaatatgctaaacccggtgccggctgtgatggtgagtgtcactgacaaggccggaaataacaatataataacagtggcatgggcggggacggtgtgcaccaatccgcctatgctttcaatatctgtaagaccggagcgcttttcttataacatgattaaagaaaccggagagtttgtggttaatctgaccaccgaggagctgcttagagcctgtgactactgcggagtgaaaagcggcagggatgtggacaaatttaaagaactgcatctgacaccgcttgcgatgcagcatgtgtcagcagtcggaatatcagaaagcccggtaaatattgagtgcaaggtaagaaaaagcgaggagctcggcagccatacaatgtttatagcagacgtcgtcggcgtgacagtggatgataaatacatggacggaaccgggaaatttcatatcaatgataccggcctcgtgatgtattcgcacggagagtattttggctttggagataagctcggaagcttcggctactctgtaagaaaaactaaaaaataatctatcgaagcagcatatccatgaggtatgcgtacacatcctcgttctgattcttccagttgctgcagatggcctcggcctgctcctttgtgccgactgagagagtcaggtcgattatggtggtgctctctgagcgcacctgacaacgtactgcatatttgcggtcagttgtcctgtaatagtcggcaagaatggagttttcctgcctgaactcgagcttgttgtccgtaaagaagctctttacatcggactcaataccgtcggtaattttgtctttaaagaaaccgagagtctcctttccggcagcagtcagagtgtattgtgtattggaatgagtagacttgaaattaattaaatcagcatttactaaatcaccgatgacttcctgtacacggaagtagtcggtgtattctttttccaaaaagaaattggaaatctgtgtgtttgacagcggaaaacccgctttgtcgagcatgtataaaattgtcagcttatatatggtaaatggctcagccatgattttctcctttaaaacaagtttaatcgtccctgatatgtgtctcgcacttcaaattttttattgattgtgtttagaacccgttttttatctgtgctccaaagaggtgcaacaagtaaagaacgtggtccatcaccggtcatgcggtggataaccatatcctttggaagtctttctatacagtctaccacaaaatcgcagtaatcatccagcgtaaaaagctcaaatggctgtttaatatacatatcagccagtggtgtgccctttagcacatgcagcagctgaagcttaactccgaaaataccgcttttagcaacaaaattaactgattcaagcatcatgccgcgtgtctcatgaggaagcccgagtatgagatgtgcaataacctttatgccacggcgtctaagctcatccgttacaatgatgaaatcctcaacacatgtatgtgtattcatggcatcaagagtagacctgtgaatggtctgaaggcccagctcaacccagacgggctttattttgtttaattctgagagcagatcatatatttcggtagaaaaacaatctgttcttgtgccgatggacagcacagcgacagatggatcttctatagcctcataaaatatgcgccgcagataatctaccggagcatatgtgttggtaaaagcctgaaaatatgcgataaagtgctcacagctgctctttgaagcaaccttttccttagcggcagacagctgctcctttatggaaaggctgcggtccgccgcaaaatcaccggatccaccggcgctgcagtacaggcatccaagcgatgagagtgtgccatcacggtttggacaagtcatgcctccatctaaagagagcttgtagagcttttcaccgaatgtatcgcggcagtatctgttgagtgaatagtatctcatattaaatatgtgactttacagcttcgctgacaacagcggcaacacgagggtcaaatgcctcaggcataataaaatcatcatttaattcttcgtctgaaacaagatcggccagtgcttctgcggcagcaagcttcatttcctcagtaatctgcgtagcacgtccttctaaggcaccattgaagattccggggaatgcaaccacgttgtttatctggtttggaaaatcacttcttccggttccgaccactctggcaccggcagcctttgctacatcaggcataatctcaggaacaggatttgccatggcaaaaaggatagcgtccttgttcatagaagaaaccatctcggctgtgacgatatttggagcggaaacacctacgaatatgtcagcaccctttaaagcatctgcaagagtaccctttgcgttttcaaggtttgtaacctctgtcattttctgctgcatccagttgaggtttggatagtcctttcctatgatgcctagacggtcacacatggtcacatgtgtaaagccgtatgtcagaagaagtttagtgatggcaacacctgctgagcctgcaccgtttacaacaactttgcagtcctctttctttttgccggtcaggcgcagagagttgatgataccggcgagtacaacgattgcagttccgtgctggtcatcgtggaatacaggaatatcgagcatctctttaagtctctcctcaatctcaaagcagcgcggagcagaaatatcttctaagttaattccgccaaagcccggtgcgatatttttgactgcagcaataatctcctcagtgtcctgagtgtcgagacagataggaacagcgtttacgttgccaaactccttgaaaagtacgcatttaccctccatgacaggcatggcagcgtaaggaccgatgtttccaagaccaagcacagcacttccgtctgacactacggcaacggtatttgccttccaggtgtatttgtatgcagcttccttatcctcggctatgatcttgcaaggctcagcaacaccgggggtgtatgcaattgcaaggtcctctctcgaattaacctttgatttagcgatggtttcgagttttccgttccactcttcgtggcatttcagtgctttttctttattatccatggtaattctccctctaaaaattcttttgaataatcataacattgcaggtgatttaaatcaagtaactatgcagataaccgattatataaaaatatgataaaaaataagaaatcgctttatatttttgaagaaatgatgtataatcattaattaatgattcaaaagtcaattcaggcgttatttcccaatagctacacatatatatttgttaaataatattgtttagacgaattgaataaatactgttatcaaatttaaggagaagacgaaatggaacagatgagagaaaaatatgaaagtttgtcggcatttgtgcttaaggatctggcgaaggcaagaggaattaagggcgtttcatcactgaaaaagggacagattattgaaagaatgctcgaggaggatgcaaaagaggttgaggaggctgagaaaaacggtacagccgaggagcgcgccaactcttttaaagaggattatgcagcactcgacagtggagaagaggcagaaggcatacttgaggtaatgccggagggctttggatttatccgctgtgataattatatgccgggagatcatgatatctatgtggcacctgcgcagatacgccgcttcaatttaaagacaggtgatatcataaagggtaatatgaaggtgaagtctgagcgtgagaaattccaggctcttttatacctgaccactgtcaacggatatacaccggatgtagcactgaagcgtacaagctttgaggatcttgtgcctatattcccgaatgagagactgcgtctcgagagacccggagcaagtgttgcgatgagagttgtagatctcatctctccaataggaaagggacagcgaggcatgattgtttcacagcctaaggctggaaagaccacattacttaaagaggttgcaaagtctgtcactgtaaacaatcctgagatgcatcttattattctccttattgatgagagaccggaggaggttacagatatcaaggaggctatagagggggacaatgtcgaggtaatctactctacatttgatgaacttcctgagcatcacaagagagtgtcagagatggtaatagagagagcaaagcgccttgtagagcatggtaatgatgtcatgatactccttgacagcataacaaggcttgcaagagcttacaatgtgacagttccaccatcaggccgtacactttcaggaggacttgatcctgtagcgcttcatatgccaaagagatttttcggagcagcacgtaatatgagaaatggcggcagtctgacaatacttgcaacagcccttgttgatactggaagcaagatggatgatgtagtatttgaggagttcaagggaacaggaaacatggagcttgtgctcgacagaaagctttccgagaagagaatcttccctgctatagatatagtaaaatcaggaacaaggcgtgaggatctgctccttgatgaggatgagcaggcagcagtcgataatatgcgtaaagccttcaacggcatgcgctctgatgaggctgttgagaacgtactgaacatgtttgcacacacaaagagcaacaaggaatttgttaatcttgtaaagaaaaacagaattttataaaaatgtcttgcaattgacagattcatatgctacaataactaagctgtttatcgggatgtaaacggacgcaacgtgtcgctcttgcagcaagtatcatatgcggatcgggcatacgggtataaagagtgaagctaaagaaatacgataagaatataaaagaggtgaaaatcatgagagaaggaatccatccagattattatcaggcaactgttacatgtaactgtggtaacacattcgttacaggatctacaaagccggagatccacgtagagatttgctcaaagtgccatccattctacacaggtcagcagaaagctaaccaggctcgtggacgtattgagcagttcaataagaaatatggtatgaaatagaatcatatagttacttgaaaggttgaggttgcaatatacctcaaccttttttggaatatagagaggttttatgaagtattcaggtattggcggtcaggctgtcatggagggcgtaatgatgcagaacaaggacacatacgccgtagccgtgaggaagcctgaccatgaaatagatgtcaaggtgtcaaagcgtaagaattcaaagacgcttgatgtagttagaaaaattcctattttaagaggtgtggtgagctttgtcgattcgctttatctgggcatgagcacactgatgtattcagcgtcatttttcgaggacgaggatgatgaagggaccttggcttcaaagaaaaaggaaaaggaagaagaactcacagcggaagaaaagaaaaaaagggctgccaaagaaaaaaaacaggaaaatgccatgcttggaggtacagtggtactgtcaattgtcatagcactcgcgctgttttttgcattgccgtatttcctttctgggctttttaaaaaggtgataagctcacagatgctcatagcgttcatagagggcgttatcagactggcaatatttctggggtatatagcaattatatcgctgacacctgatattaagcgcacatttatgtatcacggctctgagcataaatgcatcaactgcatagagcacgggcttccgcttacagtggaaaacgtgagaaaaagctcaaagcatcacaagcgctgcggcacaagctttctgcttatagtaatgctcataagcatattatttttcatgtttatccgtgtggatacaaagccgctgcagttattgttacgacttgtgcttattcctgtaatcgcaggggtatcttatgagtttatcagacttgcaggcagatatgacaatccggttgtcaacatgcttagtgtaccggggcttttaatgcagcgaatgaccacaaaggagccggatgatgaaatgatagaggttggcatcgcatcggttgaggccgtgtttgactggaagaaatggcaggaggaaaacaatgtgtgtgcacattgaccgccggatagaaggtatatatgacatatagagaagcaattttacttggggaaagcatattacaaaaagcaaagatagttgatgcaaaaaacgatgcatggctgcttttagccatggcatgcaggatagatcacacatattactatgtgcatatggatgaggaaatgtcgcaggagcagataagggaatatcaagcattgctgagtaagcgcgctgagcgtattccgctccagtacatagtcggagagcaggagtttatgggactcaaattccgtgtgaacagcaatgtgctcataccgcgtcaggatacagagactcttgtagaggaggcactcaaggtgatagagccggggatgagagtgcttgatatgtgtacaggaagcggctgcataattataagcatcttaaagaacacgactaatgtggacggtgcagcctgtgatatctcaaagcaggcgctcaatgtggcaaaggaaaacgcaaggcttaacggcgtgtttgttgattttgagagaagcgatctgtttgagcatgtcgatgagatgtatgatgtgatagtatccaatccaccatatataagaagcgacgagataccgcatcttatgccggaggtgtcggtatttgagccgcatgaggctcttgacggctctgaggatggacttttattttacaggcgtatcataaaggattgcagggcaaatctaaagccacagggcaggctgctttttgagataggctgcgatcagggcagacaggtgtcagagatgatgcagtttgccggatttagcgatgtacatgtgataaaggacctggcgggaaacgacagggtagtatcgggagtgtatgacagcaaggaggaaaaacatgtttgataagttagaagatcttatacaccattatgaagagctgatgaatctgctcagcgagccggatgtggcaaatgatgcaaacagatttaaaaagcttatgaaggagcagagtgaccttgctcctatagttgagacatataagaaatataaagagtgcaagcagaatatcgaggattcactggctattttggatgaggaatcagatgaagagatgagagagctcgcaaaggaagagcttaaggattcgaaggaacaggtggaggaacttgagaagaagcttaaaatacttcttctgccaaaggaccctaatgatgacaagaacgtaatcgtcgaaatccgtgccggtgcaggcggagaggaagcagcactttttgcagcggaaatctaccgtatgtatgtgcactacgcagagaacagaggctggaaggtggagacacttgatgccgatgagacaggaatcggcggtatgaagtctgtcgagttcatggtaaagggctcaggtgcatactctattttaaagtatgagtcgggagtacaccgtgtgcagcgagtgcctgagacagagtcgcagggacgtatccagacctctacatgctcagttgctgtaatgcctgaggcagaggatgtggatgtcaagattgatgacaaggatatcagaattgacgtaatgcgtgcttccggaaacggtggacagtgtgtcaacacaacagattcagcagtccgactgacacattatccaacaggtattgtcatctacagccagactgagaagtcacagatacagaacaaggaaaaggcttttgcacttcttcgtacaaagctctatgacatggagcttcagaagaagcaggatgcagaggcagaggagagacgaagccagatcggtacaggagaccgtgctgagaagattcgtacctacaacttcccacagggacgtgtgacagatcacagaatcaatctgacactctataagcttgacaagattcttaacggagatatccaggaaataattgatgcctgtatcgcagccgaccaggcgaagaagttaagcaacatggagcatgatgcataaatatttggtataaaagagtctgagaaaatcaggctcttttattttataaactaatatgatataattgtgaataaatatttatacagaaatgaggaataatatgaaatccattaagaaaaaaccgattatgattttgcttatggcagcattaatggccacattcatcgcctgtttatgcgcatgcggcaaaagcgacagcaaaaaggtcgcttgtgtggacgatctggagggcgcaaaaataggtgtccagctcggtaccacaggagatatctatgtatctgattatgagaacgacggttcaggcaccaaggtagagagatacaacaagggtgctgatgcagtccaggcattaaaggtcggcaagattgactgcgtggttattgatgagcagccggcacttgcctttgtaaaagaaaacaaaggacttaagatactggacgaggagtttaccaacgaggactatgcattctgcctgaaaaagggtaatacagagcttcgcgacaaggtaaacactgcgcttgaaaagctgcagcaggatggaacagttcagagcatcatcgacaactatatcggctctgaagatcaggtgggaaagactccctacgtgaagaagaacattgacaggtcaaacggtacacttaaggtaggaaccaatgcagagttcccgccatatgagtactatgaggacaacaaggtcacaggaattgatatggatatcatgcaggccatagccgatgagcttggcatggatatgcaggtagaggatatgcagtttgacgcaatcattgccgctgtatcatcaggcaaggtggatgtcggagcagcaggctttacagtgacagaggacagacagaaaaatgttgattttaccgatacgtatatcaccacaaagcaggagattatcgtaaaagacagccagtcgggttcttcaatcggtataaaggaaaagctctatgacaactttgtcaaggacaatcgttacatgtatatcgtaaagggtcttggcaatacaatagttatcacaatatttgccgtaatgcttggtattgtgctgggatttttaattgcgatagtcagaaccagccatgacagaaacggcggtcttgccatattaaacggaatttgcaaggcatacctgaccatcatcaggggaacacctgtcatgatacagcttcttattatatactatgtagtacttgcatctgtgaccaacaagatacttgtagcagtcattgctttcggcctcaactcagctgcatatgtggcagagattgtgcgttcaggaatcatgtctgtagatataggacagtttgaggcaggacgaagcttaggactcaattacagacagaccatgaagcttgttatcataccgcaggctgtcaaaaatatacttccggcgctgcttaacgagtttatcagcctcctaaaggagacatcaatcagtggttatattggtatgatggatctgacaaagggtggagatatcatacgaagcaacacatacgaggcatttataccgcttattgctgtagcccttatttatctggttatagtgatgcttttaagccacggagtaagcaaacttgagaggagactgagaagcaatgaaagataataacgtgatactagaggtaaaagacctgcacaagagttttggagagcaggaggtattaaagggcataagcacagaggtgaacagaggtgatgtaattgccatcatcggaccgtcaggctgtggaaagtctacatttttacgctcactcaatctgctcgagacacctacatcaggacaaatcctttttgaaggaacagacctgacagacaagtcgacagacatcaatgtgaccagacagaaaatcggcatggttttccagcagttcaatctgtttgccaacatgaccataaaggcaaatatcatgctcgcaccggtgaagcttggtgtgatgacgaaggatgaggcatcaaagaaggcagatgagcttctcaccagaataggtctcctcgataaggcagatgcatatccggcgcagctttccggaggacagaagcagagagtggcaattatccgttcacttgctatgaatcctgatgtcatactgtttgatgagcctacatcggcacttgaccctgagatggtaggtgaggtgctttcagtaatgaaggagcttgcagaggcaggcatgacaatggtagtcgtgacacatgagatgggctttgccagagaagtggccaacagagtgatgttcatcaatgagggtaccatagctgaggagggcacacctgaggaagtatttggcgcaccaaagagtgagagattacaggaatttttgtcaagagtgttataggagaaataaagcatggcatcaaaatactatgcggtaaaaaagggaaaggttcccgggatctatttgaactggaacgattgcaaagcaatggttgacggatatccgggagcagtgtataaaagctttaagacaatagaagaggcagaaaaatttattaacggagagaaaattattgccggagagaaaactattacaggtatgaaatcatccggcgaaaatagtacatatgcgtttgtggatggctccttcaacaaagcaacacacacctatggctatggaggatttcttgtgactgaccatgaaaaatacgtgctgcagggggcagataatgatgccgagatggccacaatgcgcaacgtagcaggagagataaagggcgcggaggctgccgtaaaaaaggctatagagcttggaattaatgaactggtcatatactatgactacaagggcatagagatgtgggccacaggggactggaagcgaaacaaggcaggcactatagcttatcacgaatacatcatgtcagttaaggataaaataaagcttacttttgtaaaggtaaaaggacactcaggagtagggggcaacgaagaggcagataagctcgccaagcaggctgtggggatactgtagcagtttcccacataaaagaaacaaaaatatagcataacaggagaaaaaatgagcatattcaatgtagaactcaaaaaagtagtagatgacacatatgatattgagataggctacaacctctcagacacccttgtatctgacctggaaaatggtcttgcgggcaagataaagaaatttgcagtgattacagatacaaatgtgcgtgatccttatgctcttccaatctgtgagaagataaagcatgcgggatactcagtggatttgtttgttttcccggctggggaaaagagcaagtcacgtgagacaaaggcaaagatagaggatgccatgcttaaaaaggggtacagaagagactgctgtattattgcagtcggtggcggtgttgtaaccgacttatcaggctttattgcaggaacctacggcagaggagtgccgtttatcaactatgcaaccacccttctagcggcggcagatgcatcggtaggtggaaaaacagcaattgatacacctcttgctaccaacaccataggtctgttcaatcagccccaaaaggtatatatagacatagctgcttggaaaacactgccacagcgccagatggcaagcggcatggcagagaccatcaagcatgcatgcttaggcagcgaggatatgtttgaatttatagaggaaaatctggatgatatatattcattcaagaaatttgcatgtgagtatatcgcagaaaataactgccgtatcaagtacaatgtggtcatgaaggatgagcgagaggcgggacttcgcgaaaccttaaatctgggccacacagtaggccgggcaattgagacagtcagcgactacaagctgttgcatggagaggcactgtcgattggaatggctgcacaggcacttatgtcagcacggcttggctatatgtcggaggagcaggcagagcgcgtgataaagctctatgagagagccggtcttccaacacgtatacctgactatatagacagggaagagcttgtaaagaaactctacaccgacaaaaaggtgagagacggcaagctgcgcttcgtgctccaaaaaggcataggagccactgttgagtttgcaccgggagtgtatgcaaagcctatagaggaaagtctggcacgagaaattataatggagctgtagattaaataattacaaccccatgtgtaaactcattttgctgtgaatgacacagcctgccatacaaatcagcagcaaaaatatccttggaaataagctcgtacggagcatcagcgacttttgtaataataggcactgatgctctttttttgaggagatgcataagctctcctgatgattttttaaaaccaagtatgcgcagataaggattatccatacatatgttaaaatcattattctcaataccaagtaaaatatgcatgagaacccttgaaatacgcgtataagtcagatttttactcttcagtaagttacaaaactgcgtaaaaccttcatatttataaatgtttttaactatctttgcagaaagctcctttgtgcagtctgaatactgcgcaaagcctttatccttccaggtcagcaggcgatagtaaagcatttcagaaatatcatccggaaacacaatatgaccgcctaaaatacaattgacaagaatatcggcgcagtctgatggcattagctgactgaactttgtggaaatccatgaattatcaagctgtatattagtaatagtgttgtgtttgtctatatcaatcaaggtcgaaatcaccccacgcacagctgtagcggaagaaaattcacttgtcgaatccgtgctgtgatatccttcaccgatgcgctgaataggaaatcctgtaatatcacagtccatcaaagccttctcatactcaatggccagaatattattgggtgaagctatgaaagaatctaatttctcggaagagctgtcataggtatcttgaaaatattcacatagagctctgcccctggccgcaggaaagctcatcccactctgaatcagccgggcaagagaggcggaatacttagcaggcggattcttaagcacgccagcaacaagctttgtaagctcatggtccacagactccacaccatagcacagcatgtccaccacacctgtgtttttgagtacactgactccgccaccggcaaaaaactcggcagaagcagtggcaaagaccgatggaagctcaagcaccaggtcggcaccgctcaaaagagccatgcgtgtgcgctcgtatttgtcaattatggcaggctcacctctctgcacgaaatcaccgctcattactacgacgatataatcagcagatgtctgccttttaatctgctctagctgatatttgtgcccattgtggaatggattgtattcggtaatcacacctgcgaccttcatgttttgctgctcctttaatcgataatgtattttttagagttcaaaaccataataccataaaaacacccttgtcgcatttgaaaaataagtttatactaacaatagtattgtaattttaaaccaaaggagacaaaacaatgaatgtattagtaattaattgcggtagttcatcactgaaataccagctcatcaattcagattcggaggaggtacttgcaaaaggactctgcgagagaatcggaatcgatggcagactcgtatatcagaaagagggtcttgataaggaaatcacagaggcacctatgccaacacataaagaggctatccagatggtactcgatgcacttgtaaatccaaagacaggcgcagtaaaatcacttgcagagatcgatgcagtaggacatcgtgtagtgcacggcggagagaaattctcagactcagtagtcatcacagaggatgtaatcgcacaggtagaggagtgcaacgacctcgcacctcttcacaacccagccaacatcatcggaatcagagcatgtcaggcacttatgccaaacgtaccaatggtaggagtatttgatacagccttccatcagacaatgcctgagaaagcatacctctacggtcttccatatgagtactatgagaaatacaaggtaagaagatacggcttccacggtacaagccacagcttcgtatcaaaagaggcagcaagctaccttggaatggacttaaacaactcaaagattatcgtagcacaccttggaaacggagcttcggtcagcgcagtattaaacggtaaatgcgtagatacatcaatgggacttacaccacttgagggacttgtaatgggaacacgttcaggtgatatcgacccatcaatcatggagtttatcgcaaagaaagaaaaccttgatatcgatggtgtgatgaatgtgcttaacaagaagtcaggagtagccggtatgtcaggcgtatcaagcgacttcagagaccttgaggcagcctacaatgagggcaacgagcgtgccatcgcagcagtagaggtattcagctacagagtagcaaaatacatcggagcatatgcagcagcaatgaacggagtagatgctatcgcattcacagcaggaatcggtgagaacacaagctttgtaagagaaaaaatcatggcatatttaggttaccttggcataaagatcgaccatgtaacaaacgacaagacacgtggcgtggaggcacttatttcaacagcagactcaagcgtaaaggtatgtgtcatccctacaaacgaggagcttgcaatctgccgtgagacagtaaagcttgttggctaataaaaagcaaaaagttgtggataaattataaaattttgttgacaaacaccactccaatatgtataattggttaggtgtgaataggagagagctatgattgatatatcaaccattgtaaaatctatcaataaagagacaacaattgagacagagcttacgctcacatcatttgagtcgcggttaggagattatcctattctgaaaaagcagccgatatcacttcatatctcaaacgtggagaatgcagcagtgcacatcacgggaacagtagatatagacatagcgataccgtgcagccgatgcttggaagaagttccaacaaacatgcattttgacattgacaagactctgaaaatcacagacggagcattagtcgatgaagagatggaggaaactgactacctgattgggtttgaactcgatgtagataaacttgtctacgccgaaattctggtgaactggccaatgagagttctgtgcaaagacgattgcaaaggtatttgtaaagtctgcgggatgaacttgaataaaggcacctgcagttgcgatagttttgtaccggatccaagaatggcagcgttccaggatatatttaacaagtttaaggaggtgtaaacaaatgtcaatttgtccaaagaataaatcttctaagggaagaagagataagagaagagcaaactggaaaatgtctgctcctactttagtaaaatgcagcaaatgtggagagcttatgatgccacacagagtttgcaagaactgcggatcatacaacaaaaaagaaatcattcctcaggactaatagtagaaaaccagtaaaattaaggattgaacgatatcgttcaatccttttttgattgattttatccctttttatcccataataaaatgaaggtactttttgcttgtatatagcttgcagggatgttattatactgagaggatatttagatattaaagaaagaaggaagcaaactatcatgaataatatagacgatttagttgaaatctatgagtgcccgctctgtggcggtgccgggattctcgaggaggactgcggcagctcatattatgtgacatgccttgagtgcggatgccactctgtgaatattgattttaaatcagacgaggacagacttgatgcagcaaagcgcactgctgatttatggaactgtggcaaggttatttcaatgagtccgggagaatgatggaagccatatagagtagtgaattggttattgatttatgcttatgattatagtatattttatttaatcaattagtagtttgctttttagcaggcacagggaggtcacaatgcaaagtacaacaagggtcgcactcgatgcaatgggtggcgacaatgcacccgcagaggtagtaaagggtgcggtagatgcggttaacaaaagaaatgatataaagatatttcttataggacagaaggtaccggtagagagggagctttctttgtatacatatcctaaggagcagatagagatagtagatgctcctgaggttatagagatggcagagccaccggttgtggcaatcagacgaaagaagcagtcatcaatcgttgttggcatgaatatggtcaagaataaagaggctgatgcatttgtttcggcaggaagctcaggtgctgtgcttgtcggaggacaggtaatagtcggcaggataaagggcatacaaaggccgcctctggcaccgcttattccgactgagcgcggagtatctttgctcatagactgtggagccaatgtggatgccagagctgagcatctggtacagtttgctaagatgggctctatctatatggaacatgttgtcggcgtgaagaatccaaaggttgcgctggtcaatatcggtgcagaggaggagaaaggtaatgccctggtaaaggagaccatgccgcttcttagagagtgcacagatatcaattttgtcggaagcattgaggcaagggatattccgaagggagatgccgatgttatagtctgcgaggctttcactggcaatgtcatattaaagctttacgagggtctcagctccacacttatcggggttatcaagaaggggctcatgagcacactaaagagcaagataggagctgcacttgcacttccggctcttaagaatacgctaaagtcatttgatgcgaccgagtacggcggagcaccgcttttaggattgaatggtcttgtggtaaagacccacggcagctccaaggcaaaggaaatcactaactctgttttccagtgtgttacatttaaggaaaaagagattaatgataaaattaaagaatatattattaataagccggctgattagatagcagtattgctgtatgattggtcactataaacagaaatgagaggtattaaaaatggaatttgagaagcttagagacattattgtcgaggtacttaacgtggatgagaacgaggttactatggagtcaaccttcattgatgaccttggagctgattctttggatgtattccagatcatcatgggtatcgaggaagagttcgatatcgagattcctaatgaggaagctgagaaaatcgtcactgtaggcgatgctgttgagcagattaaaaaagctgtaagcgagcagtagtatgtttaactaatgaaaagccctttattataagggcttttcgttatactcacggaacatgtaaaatggatagatatagaaatagaggaaaaattatggcagatttaaatgaatttcaaagcaaaataggctatacgttcaagaaccaacatctgcttgagcaggcgctgacacacagctcgtatgccaatgaaaagcacatgaaaaagcattctgataacgaacgtctggagtttttgggcgatgctgttttggaaatagtttcaagtgagtttttgtttatcaattatccgcaaaagcctgagggtgagcttaccaagctgcgcgcaagcattgtttgtgagccgactcttgcactttgtacaaagccacttgaccttggaaagtacttacgtcttggcaggggcgaggatcatacaggtggcagaaagagaaaatcgattctttctgatgcacttgaggcagtgattggagcaatttatttagatggtggttttactaatgcaaaggagtttgtgcttaggtttatcatgactgatattgagaataagcagctcttttatgatagcaagactatccttcaggagcttatacagggcaggcatgagcagctttcctatgaacttattgatgagagcggtccggaccatgacaagcagtttacagttgcggtgcttgtggacggcgagcgtgtcagcgagggagaaggccacacaaagaaggcggcggagcagcaggctgcatatcaggcacttcttttgtacagaaacagggaataggagtttttaatgtatttaaagagcttggaagtacagggctttaagtcctttgccaacaaaattgtttttgagttccacaatggcatcacaggtattgtcgggccaaacggcagtggaaagagtaatgtcgccgatgcggtcagatgggtgctcggtgagcagagcgcaaagcagcttcgtggtgccagtatgcaggatgttatttttgctggtacagagaacagaaagccgcttggatacgcgtatgttgcaatcacacttgacaattcagaccattcgcttgcgattgatttcaatgaggttacggttgccagacgtgtttatcgctcaggggagagtgagtatctaatcaatggcaatccgtgcaggctcaaggaggtttcggagcttttttatgataccggtatcggtaaagagggatattccatcattggacagggccagattgacaggattttaagtggaaagccggaggagaggcgagagctgtttgatgaggctgccggcattgtgaagtttaaaaagagaaagcttacagcgcaaaagaagctcgataatgagcgagagaaccttgtgcgtgtcaatgatattctgacagagcttgagagacaggtaggtccgttacagagacagtccgagaaggctcatacatatcttaaaaagagagaagagctgaagaactacgatgtcaacatgtttttgcttgaatcagcgcgcattgagaccgagcttaagtcagctgatgagaaatacgctattgcggatgacgagctaaaggagaccaacgccacatacgagagcatcaaggcagagtatgaggggcttggaaatgatatgcggcagatggatgagcgtattgagtctcttcgtgagagcatcacaagcacttcatccaccagacagaagcttgagaatcagatagagcttttaaaggagcagattcacacggccgaaatgacggatgagcatttgcagttgcggcttttagctatcgaaaaggaaaaggcgcagcgtcttaaaagcaggaaagagtatgatgacaaaaaagctgcactggaagctgagatagagcagatgaggctaaacgagcttcttgcggtaaatgagcatgaggctgtgcttgcagaggtcaaccgctgcaatgacggactggaaaagggtaagaatgagcttattgccctgcttcaggagcgaggcagtatccagtcaaggaagcagcgttttgccactatgcttgagcagattaatatcagaaaggcggagcttaccaagcgtcttttagatagaaagacaagggaagcagggcttgatgatatattggatgatgccaataagaagcttaatgctgtcaatgaagagatagccggtttaaaggaaaaggagtcggctcttttggcaaaggccagggagtggagagataagtccggagagaatgcccgcctgatggaggaggcttccacagagtatcataagtctgtttccaggcttgagtcacttaaaaacattgccgagcgctatgatggctatggcaacagcatcaagcgtgttatggagcagaaggctaaaaatccggggcttctcggagtggtttcagatcttatccaggtggataagcgctatgagatagcgatagagacagccttaagcggcaatatccagaatatcgtcactgaggatgaggccacagccaaaaagatgattggctttttgaaggccaatcattttggtcgagctacgtttttacctcttacaagtgtgcgtgcaaacagaaatactaaaaatgaggcggcactcggcgaaaagggtgtgcttggcattgcaaataagctggtgaagtgtgatacgaagtttgatgaggttgttgcatacctgcttggcagagtgattgtggtggacacaattgacaatgcaattacgcttgcaaagaaaaatcactattcactccatatcgtgactgtcgagggcgagtatctggcaccgggaggatctatgtccggtggtgcgtttaaaaattcatccaatctgcttgcgagaaatcgtgagattgaggagcttgaaaagagagttgatcagactaagacaaagcttaaagagcttagagccagaaaggatgatattgcgactgctattgcgcttggcgaggaggatatagcagccacaaagaccctgcttcaggagaagtatattgagcagaacacagcacagatttctgttgacagggcagaccagcaaaagaaggagagtgcgaatgtctacgaggatctgcgcacagaaaatgcggagattgaaaaacagctcgaagagataaatcagggcaagaaggatatcgcagcacagcttgaggcatcaaagcagcgtgaggagcagcttgagaaggaaaacagctcatacagtgagatacttgaaaagcagggagtacttgagcaggaggcttcacacaaggccgctgccatttcactggagcttgcaaatattacaaagacggctgagtttgctatagaaaatatcaatcgtatcaattcagagatagaaaaattcgatgagcagaagaaaagccttgtggaaggtgcagctgctgcaaaggatgatattaaaaagaagcaggctgatattgatgcaattacacagaccattctggcgtcaaaggacaacaattcaaagcttgacgaagagcttagggagagccttacaaaaaaggaaaagatgtctgaggattatagaggcttttttgcaaagcaggaggaagtttcaaagaaacaggctgctctggataaggagcttttcagactgaacagccagagagagaagcttaaggaggcttcagagactcagatcaactacatgtgggatgagtatgagcttactccgcatgcggcttcagagcttagaaatgatgcatatgatgatctgccttcattaaagaagctgattgcaggcataaaggacgaaatcagacgcctcggagatgtaaatgtcaacgctattgaggaatacagggagatttcaacgcgttatgagttcttgaagggacagcatgatgaccttatcgaggctgaaaagactctggttggcatcattgatgagcttgacagtggtatgagaaagcagtttacagagaagtttgccgagattcagagagagtttgacaagtcctttaagcagctttttggtggtggccatggttccctggagcttgtggaggatgaggatatactggagtgcggcataagaatcgtcgcacagccgcccggaaagaagcttcagaatatgatgcagatgtccggtggagaaaaggcgctcaccgctattgcacttttgtttgccattcaggcacttaagccatcaccgttttgtctgcttgatgagattgaggcggcgcttgatgattcgaatgtttcgcgctatgcaaattatctgaacaagcttacaaagaacacacagtttatcgtcatcacacacagacgtggtacgatggcagcagcggacaggctatatggtattacgatgcaggaaaagggtgtttccacactcgtttcagtaaatcttatagagaatgatctgacgcagtagaattttatttatggagagttgaaatggaagaaaaagaaaaaaagccgggcttttttaagaggctcgtttcaggactgacaaagaccagagacaatattgtttcaggcatagattcacttttcagtggattttcacatatagatgatgatttttatgaggagcttgaggaaattctcatcatgggagacctcggagtgagagctacagagagtatcatcgaggatctgcagaggaaggtgaaggagcagcacatcaaggagccggcagagtgcaaggaactcttgatcgagagcatcaaggagcagatgaaggtggaggagaccgcctacagatttgaaaatgaaaagtctgttgtgcttgtaatcggtgtcaacggagtaggaaagactaccactgtcggaaagcttgcaggaaagctcaaggaacagggcaagaaggtggttattgcaggtgccgataccttcagggcggcagcaggcgaccagctgaaggaatgggcaaaccgagccggagttgatatgattggcggtgccgagggtgctgacccgggagctgttgtatatgatgcagttgcagcttcaaaggccagaaacgcagatgtgcttctcgtggatacagccggaagactccacaacaaaaagaatctgatgaatgagcttggaaaaatcaataaaattctggagagtgagtatccggatgcgtacagagagacactcgtcgtgcttgatgcgactactggccagaatgcactggttcaggcgagagagttttctgaagtggcaaagatttcgggcatcgtgctcaccaagatggatggtacggcaaagggcggtatcgctgtagcgatacagtcggagctttcagtgccggtcaagtatatcggagtcggtgagacaatcgatgatttgcagaaatttgattcggacgagttcgtgaatgcattgtttgacactaaaacggaataatttaaaaatatctttgagcgtataagttatattgtttataataatctgatatatcagtttatatatatatgtacggaatttttggtataatataatgaaaaataactttcagaaccactgagaataatgcgtttttgcgaatatgtgtgggtggttatgaatagttataccgaagaaatgaaaggaaaaacaaatatgctgacattagataaatttgaagaagcaagtgagaaggtcaaggaggtcacccttgagacaaagctcatttacagtgactttttaagtgaccagacaggcaataaggtatatctgaagcctgaaaatatgcagtttaccggggcttacaaggtcagaggtgcgtactacaagataagcacactcacagatgaggagagggcaaagggactcattacagcatccgcaggaaatcatgcgcagggtgttgcgtatgctgcaaagtgctatggctgcaaggctgtcatcgtgatgcctaccaccacacctcttatcaaggtaaaccgtacaaagagttacggcgctgaggtagtgctttacggagatgtgtatgatgaggcatgtgctaaggcatatgagcttgcagagaaagagggctacacatttatccatccgtttgatgatttagctgtcgcaacaggacagggaactattgctatggagatattcaaggagcttcctcttgttgaatacatcctcgttccaatcggaggtggcggactggcaacaggtgtatccacacttgcaaagctgttaaacccaaagattaaggttatcggagtggagccggccggcgctaattgtatgcaggagtcatttaagaatggaaaagtgaccactttaccaagtgtaaatactattgcagacggaacagcggtaaagacaccgggctcaaatattttcccatacataaagaaaaatcttgatgatattatcacagtggaggatgacgagcttatcgtggccttccttgacatggttgagaatcacaagatgatagtcgaaaactcaggtcttctgactgtagctgcgcttaagcatcttggggtaaaggacaagagagtggtttctatcctaagcggcggcaacatggatgttattaccatgtcatcagttgtacagcagggtcttattttcagagacagaatctttactgtttcagtgcttctgccggataagccgggcgagcttgcaaaggtttcacagactcttgccgatgtacagggcaatgtaatcaagctggagcataaccagtttgtcactacaaacagaagtgcggctgtcgagcttcgcatcacgcttgagtgttttggtacagagcacaaggagcagattatagcggcgctcgagaagaagggctataagccgagaattgtacgcactatgatataaaaataaaagtatcaagtatttttacttgacaccgggcaaactatgtgttattctaccataggttcgagggaaaaagaggatacttgatatggaagaaaaacttgaacaggcatatttatatgatttctatggtgagcttttgaatgagcatcagcgtcaggtatatgaggattttgtcttcaatgatttgtctctcggtgagatagcatccgaggaggggatttcccgtcagggtgttgcagatctgattaagagatgcaataagaagctgcttgactatgaggcaaagcttcatcttgttgaaaagttcatgtccataaagagtgacatacgaaggattcatgagctgacaaatgattttaagaaatcacataatgagctattaatgaatgaaatcgaagctatttcgaatcagatactagaggagctgtaatatggcatttgacagtttatcagaaaaactgcagaacgttttcaaaaatctccgcagcaagggaaagcttactgaggatgatgtaaaggctgctcttaaagaggttaagatggcactccttgaggccgatgttaacttcaaggttgttaagcagttcacaaagagtgttcaggagagagcaatcggacaggatgtcatgaatggtctcaatcccggacagatggtcatcaaaatcgtaaatgaagagatgattaagcttatgggctctgagacaacagagattgctttcaggccgggcaaggagcttaccgttatcatgatggtaggtcttcagggagccggtaagacaaccaccacagcaaaaattgccggaaagcttaagagcaagggcaagaaatcactgcttgtagcctgtgatgtgtatcgtccggctgcgattgagcagttaaagataaatgggcagaagcagggcgttgaggttttctcaatgggtgacaaaaacaagcctgccgacatcgcaaaggctgctgtggagcacgctaagaaaaacgatttcaatgttgttatcatcgatactgccggacgtcttcatattgatgaggatatgatggcagagcttattgagataaaagaagctactgatgttttccagaccatcctcgtggttgatgccatgacaggtcaggatgcggtaaatgtagcaggtacctttgatgaaaagataggaattgacggagttgtcatcacaaagcttgatggtgacaccagaggtggagcggcactttcaatcagagccgttacaggaaagccgatactttacgcaggtatgggcgagaagctttcagaccttgagcagttctatccggagcgtatggcttcaagaatcctcggcatgggcgatgtgctttccatgattgagaaggcgcaggagaacattgatgaggaacaggccaagaagcttgagcagaagatgcgcaaaaatgagtttgattttgagatgtaccttgattcgatgagtcagatgaagaagatgggcggtctttcaagcgtgatgggcatgatgccgggcatgggtatcggtggaggcaagatgccggatattgatacagatgaagctgaaaagggcatggcccgcacagaggcaatcatctattccatgacaccggaggaaagacgaaatccaaagcttcttaatccaagccgcaaggctcgtattgcaagaggagcaggcgtggatgtatcagaggtcaacagacttgtaaagcagtttgagcagacaaagaagttcatgaagcagatgcccggtatgatgggcggaaagaagggacgccgtggaggcggtggtcttggaggattattcaaaggacttccgttttaatggatttcattaaaggaatttcattaaagaatttcatgttttgttaacaaaagtatttattttacttttgatatatattattcaataaacctatgaggaggtgaaataaaatggcagtaaagatcagattaagaagaatgggacagaagaaagctcctttctatagaatcgtagttgcagactctagatcaccaagagatggaagatgcatcgaggagatcggaacatacgatccaactaaggatcctagcgagtatcatgtaaatgaggaattagctaagaaatggttatcaaacggcgcacagccaactgagacagtagctagaatcttcaagagtgctggtatcgagaaataggataaagaggtggcgtaatgaaagaattagttgaagtaattgcaaaatctttagttgattatccggatgaggttaatgtaactgagaccgaaaacgagaaagcaattgttttggaattacgtgttgcacagtctgacatgggcaaagtgatcggcaagcagggacgtattgctaaggctattcgttcagttgttaaggccgcagcctctaaagaagacaaaaaggttattgttgagatagtacagtaacatgaaggcatctcttatgagatgcctgtttttttataatttacagtaactattcaaggtggagacagagaatggaagatttactacaggtaggtgtgattacgagcacacacggcattcgcggtgaggtaaaggtgttcccaaccactgacgatgcagctcgttttaaaaagcttaaaaatgtcattctggataatggcaaagagcgcagggatttggaaataacttctgtcaaatttttcaagaatcaggttatcttgaaatttaagggcatagatgacataaatgatgtggaaaaatataaaaaggcacctctttttgtgacaagggaaaatgcggtgccacttgaggaaaatgagtactttatagctgatcttatcgggctttccgttacatcagacgaaggagaggagcttggagttgtagctgatgtgctccagacaggtgccaatgatgtgtatgttgttaagaaagctggggcaaatgatctgctgattccggcaataaaggactgtatactggatgttgatgtggaaaatggcatgatgaaggtacatctgctggcaggtttgagatagctacatctcaaactgcaaaaaccgtaaaatgagatataaaattgaacaaaatcatacattttaaatcgtaaaacaggatgataacaggagatataggaaatgagatttcatgtgctgaccttattcccgcagatgatagaacagggactgtcagagagtatcacaggcagagctttaaaacagaatattatatcactcaatacggtaaatatcagggattttgcgcacaataagcacaataaggttgatgattacacatatggtggcggtgcggggatgcttatgcaggcagagccggtgtatcaggcagtgcgcagtgtgatgagtcagatcaataaatgtaatcaggtccattcaggtgataattccgagaaaaatatcgccgatgaaaatatattatatgaaaatacatcatataaaaatacagcagaagaaataaaaaatcacaatgcgcgtctgatttatgttactccacagggcagcgtgttcaaccagcagatggcagcagaatttgcaaagtgtgatgacctcatttttctatgtggacactatgaaggtattgacgagcgtgtgctggaggagacgataacggattatgtctctatcggcgattatgttctaacgggcggagagctgccgtcgatggtgatgatagatgcaatttcacgtctggttcctggggtgctgcacaatgatatttcggcagagacagagtcgtttcatggcaatctgctcgaataccctcagtattcacgtcctgttgagtggcatgacaaaaaggtgcctgaggtactgatgtcaggcaatcagaaaaagatagatgcatggcgccttgaaaagtctattgagcgcacaaaggagcgcagaccggatttgtatgccgggtttaaaagacttgataaatgcagagagtttcttatgaaaaataaactgcttcatattgatatgatagagcttataaacaggggctgcgccgagatactgtttgaggcagatggcgaatatctgcttcgggacatggtctcaaaggtatgctttcatacaagaccggatgagggcgggtcgaagcttattgatttggcaccggaagatgacacaaagcctgttgataaatacagcagtcagcatattccaaaaaccgttacagatcagatcacaaatggcatagtgcttcaccagcaaagatatgttgagctctttacagcaaatggctttaatgagactgtagagtgcagacaggctgtgtatacaaacaaagaaaagctatctgtcagcggactgtacagaccggatggaaagccgatgccaaatggcttagttataagaaagctggatgcagatgatatacaggaggctgcgccaatgtacccgggctttgacaatcctgactatatcatagaaagaatagaggcaggggcagtctatggcgctttttttagtgataatactgctaatgataccattaataccctcgcgggaattatcggaatccatgaggagggcagcatcggcatgctctatgtaaagccagagtacaggcaccgaaagcttgccacagcccttgaaacatatgctttcaacagggcactggaaaacggatggataccatatggccagataattgcaggcaatgaggcgtctatgcggctgcaggagagtatgggattgcatttttcaaaatcatccgtatactggatgactaaaaataatgcataaggtaggcaaaggtaggcaaagatagtaaaaaatacttgcaaatcccatgaatctgtggtaaagtaccaatgttgtgaataaaagagatggtcctctgttgtgaaaatagtagtagcattaagaacgtcaaaataattaggaggtcacaaaatgaacgcaagtgaaattattaagagcatcgagaacgagcagttaaaggccgaggtacctgagttttctgtaggagatactgtaaaagtatacggaaaaatcaaagagggtaaccgtgagcgtatccaggtattcgagggaacagtaatcaaaaagcagaacggatcaaaccgtacaacattcacagttagaaagctttctaacggtgtaggtgttgagaagacatggccactccactcaccaaacgtagagaaggttgagattgtacgtaaaggtaaagtacgtcgtgctaagctttactacttaagagaccgtatcggaaaagctgctaaggttaaagagcttgtaaaataatatttttacgcgaaagagaccattttctgcgagcaatcgtatgagaatggtctttttagttttcagggttacagcttgcaacaaacatgaaaacaatatataattaaggttacgcaataaaatattagttagcaagaggtgtaagatgtccagaagacgagcaggacttagctttagaaggcaaagaagaaaatttaatctgccattgttcaaggaaattgtttcgtgggtagtggagctgattgtagtgataggtctggcatatgtgctggtgtcatttttcggtatacgtacaaatgtggttggccaggctatggagcagacattggagaacgatgataatattcttgtgaacaggtttgcatatatcatgtcaaagccaaaggcaggagacgtgatagtattcctgccaaacggaaataataagtcgcattattatgtcaggagagtggtagcggtgccgggagatactgttcagataaaagacggcgcactgtacgtgaatgatgagctgtacaaggaatcaacggacgttgcctcaatggaggatgcagggcttgcctcagatcctatagagcttgaaaaggacgagtattttgtacttggagacaatcgaaacaacagtgaggacagccgctatgccaatattggcaatgtaaagagagactatattatcggcaaggcatggtttagattttcaggcattggaagctttggaaccatcaagtagcaatagttataacatatatagataaaggacaggtgaattatgaattttcagtggtaccctgggcatatgaccaaggcaaagcgtcagatgcaggaggatattaaattaatagatctggttatagagcttgtggatgcaagaattccgctatccagccgtaatccggacattgatgagcttggaaaaaacaaatacaggctcattctgatgaacaaggcggatctggccgacaaggagcgcaccagggagtggagtgcatttttcaaggaaaagggcttttttgtagttagtcttgatgctagaagcaagtcaggcatgaagagcatcacagatatcgtgatggaggcctgcaaggaaaagattgaaagagaccgaaagcgtggtatcaaaaacagaccggtaagagctatggtggtgggcattccaaacgtcggaaagtccacatttatcaactcatacgccggaaaagcctgtgccaagacaggaaacaagccgggcgtgacaaagggaaagcagtggatcaggctcaataaaagtgttgagctgctcgatactccgggcatactgtggccgaaatttgaggatcagacagtgggacttagacttgcgctaatcggttcgataaaggatgagattttaaatgttgatgagcttgccgtggagcttgtaaagttcctaaaagcagagtatccggggcttttggcacaaagatacgaggtaagcgaggaaaatgatatcatagagcttataagtgctgtcgctgtcaacagaaaatgcctttcaaagggaggagagcctgattacagcaaggcggctgctctcatcatagatgatttcagaagcggtaaattaggccatatcactctggagagacccaagatatagaagaatagttacgaagaatagacgataggacaaggatatgtcagcagaaaaaataggcgatattaaggaacaactgaaaagcatcacagattcacagcttgcacagttcattgagacatacggctcagatgaaaggggcggagtgattaagcttgtagacagtgcaaaaaagcgactggacaagtatgagaaggagcttatccgcactgaagttctcaagaaatatgagcgcgagtacgcatcatatgctcatatttgcggcatagatgaggtgggacgcggaccgcttgcaggtccggttgtggcatgtgcggttattctgccaaaggactgtgatattttatatatcaatgattcaaagaagcttactgctgcaaagcgcgatgagctttacgatgtcataatggaaaaggcggtttctgtaggaataggtatggcatcgcacgagcggatagatgagataaatatattgcaggctacatatgaggcgatgagacaggcaatcggaaagcttgatccggcaccggatttgacacttaacgatgcagtcacaatcccgggggtggatataaagcaggttccgattataaagggagatgccaaaagtatatcgataggagcagccagcattgtggctaaggtcacaagggatcggatgatggttgagtatgataacatatatcccggctatggatttgcatcaaacaagggctatggctcggcagagcatatcaaggcactaaaggagataggaccatcgccgatacacagggcatcgtttatacacaattttatttaatatattacaattgtgcggtttttacgaaggtgcatgggcgctgaatagttacacattctgctaaaaaccgtcagttcacaataggagagaaaatgacacttcaacaactcagacaggtacttacaattgcagaatccaattccatgaatgaggcggcaaagaagctttttgtttcacagcccaatctgtctgccacagtacgagaggtggaggaggagcttggaatcacggtattcatgagaaataaccgtggaattacagtcacagcggagggcgaggagtttttaggatacgccaaacaggttgtggagcagtatcatctgcttgagaaccggtatctgaatgtggagtccaaaaagaaattctcggtttccatgcagcactattcatttgcagtaaaggcctttgtacagcttgctaaagaggtgggcatggatgagtacgagtttgctgtccacgagacaaagacgaaagaggtaatagacaacgtaaagaacttaaagagtgagcttggagttctttatttaagtgatttcaatgaaaaggttttaagaaagctttttaaggaatgtgacatcgagtttaaagagctcttcacatgcaatacatatgtgtatctctggaaaaaacatccgcttgccggcaaaaaagtgattacacttgatgatttgcaggagtacccatgtctgacctttgaacagggcgtgaacaattccttttattatgctgaggagatgatgagtacatatgagtacaagcgtgtcataaaggctgatgacagagccacaatgctcaatctcatggtggggctcaacggatttacactgtgctcaggtataatttctgaggatttaaacggtaatgactatgcggcaattccacttaaggaaagtgaaaaaatgcatataggctatatcaagcacaagggcacgaagcttagcaagctcggtgaaatatatattgatgcgttaaagaattacgagaataaagttttataaatgaaaaattgtaaaaaatgaatttaaattaattaaatatcataccatttttataagaatttcacagttatattgttttttaaaaaaaacatgcatgaaaatatagtgaaaaatcggttacgcaaaagttatttattaaaataaatgacatgaattgacggaaaatgacggattatgattttttgacaaatgaatatcagatgttataataggcgcaacaattgattgacatgtgcgaaagcactatgttttagattataaaggtggtgttaactatgtacaataaggaaacagtaatcagacttaatacattggatgatgttcaggaatttgttggggctgcttctaagtgcgattttgacattgatctcaaatatagacagattcttattgatgcgaaatcacttcttggagtgattggaattggtacaaacaatgactttaaggtctgctatatgggtgatgaccaggcatttgataatgtggttgataaattcactgtagcgtaatacaattgaataaggtcctttgggagagtttcttcttggagctctcccttttttatgttcagtgtattaaaaatatctggatttagactgaaaatattgccggaacacaaaaccgttgacataatccggaatatgtagggagagtacatgacagaagctggaaataactatagtgaaaagaaaacacaattacatatttcggtcagaaaccttgtggaatttattttcagggagggtgacatagacaaccggtcatccagagctatgagtgccgatgccatgatggagggaacacgcattcacaggaaaatccagggaagcatggggaaggagtatcaggcagaggtgccgctttcccttgttgttgaaggtgatttgtatgagctgactgtcgagggcagggcagatggcatctttacggaggatggaaagtgttttgtcgatgagattaagggaatgtacagaagggttgagctgtttgaaaagccggtttttgttcaccgtgcgcaggctatgtgctatgcatatatttttgctctgcaaaataatatggaaacaataggcattcagatgacctactgcaatctggaaacggagcagactaagtattttcgcgaggagttctcatttgaagagataaaaaaatggtttgatgacctgatggaagagtatggcaaatgggcaacgtttcagtgtgaaatgaaaaatcaaagacaggcttcaatcaaagaactcgattttccatttgagtacagaccggggcagaaaaagcttgtttcggatgtctacaggacaattatgcgtcagaagcttctttttatgcaggctccgaccggtgtgggaaagactatttctactatttttccggcggtgaaggcggttggtgaggagctggcagacagaatcttttacctgacagcgaagacaattaccgcaacagtcgcaaaggaaacgtttgagctgcttgaaaaaaatggttacagggcaaaaactattcagataacggccaaggaaaagctatgtccgtgtgatgagatggaatgcaatccggtaacctgtccgtatgcaaaagggcactttgacagagtaaatgatgcggtttttgacctgcttcacagatgtgaaatgattgagagggatgatattttatcacaggcggataggtataccgtttgtccgtttgagctttgtcttgatatggctagctggtgtgacaatgtcatctgcgattacaactatgtgtttgacccgaatgtttatcttaagagattttttcaggaggggatcaagggagattatatttttctcattgatgaggctcacaatatggtcgaaagaagcaggcagatgtatagcgctcagatttataaggaggatttccttactgtgaagcgcattatgaaggagcacagccgttctattgagaaagcgcttgaaaagtgcaataagatactgcttgggatgaagcgtgagtgtgagaattacacggtatatgatacatttggcaatatggtattttcctttatgaggcttatgacacttctggatgagtttttgcagaaggctaatgagtttccggggaaaaaggatgttatggatttttattttgagcttcgcaatttcctgaacatttatgatctggtggatgagcactacgtgatgtattccgagcttgaggctgatggcaggttcatgctaaagcttttttgtgtggacccgtcgcttaatatacaaaagaggctggataagggcaagtcggctgtgtttttttcggcgacatttttgcctgtaaactattacaagagcctgctaagcacaaaaaaagacaactatgccatatatgctgacagcacgtttgacagcaaaaagaggctgcttgcgatggcaactgatgtgagcacgaggtacacgaggcgctcaaggagtgagtatgagcgcattgcagggtatattaatgctgttgtcacgcaaaagactggaaattatatggttttctttccgtcatataagatgatgaatgatgtggcagatatttactgtgaaaaatatgcagacgaaacagagcttatgttgcagaaaaataatatgtcagaggctgaaagggaggaatttctggacaggtttagtgaggaatcggatagaacacttgtggcatttggtatcatgggaggcatattcggtgagggcattgatttgaaaaacgacagactgataggtgctattgttgtcggaacgggacttccgcagatcagcaatgagagaactatattaaaggattattacgatgccgaaaacggctgtggctttgactatgctttcaggtatccgggcataaataaagtcctccaggcggccggaagagtaatcaggacgacggaggacacaggtgtcattttgctattagatgagagattctggcagagagaatatgatttgctctatccacgcgagtggagtgacagaaagccatgcaatatagcaaatgtcggaaaactagttgccgacttctgggagcagatttaaaaattcctcagtggatgctgacacgggcattgtggtgtttacggacacaacaatctggcgtgacggcatcttttcttttgtcttcagcacgaaaagctccttattctcatggttgatgcagtagtcaggcacgaatgctatacccagtccgattttggccagatctatgagcagatcgttactgcttagctcaatttccggaatcaggtcaacctggtgctgtaaaaacagattatgcaggaattcactggtggtgctgtttcggtcgagcatcatgataggatatttattgagctcagaaaaagctatctcctgcttgcgaagcttgaaataattgggatttgccacaaaaacatcggaaaagttgcatatggttttctgtctgtatgagtgattgaggtgcgagtttggaaaattcgtgacaatcaggtcaaccttcctttgctccaaaagctccacacactggatagatgtggcatttgtgaccttgataggcacattcggaaacctctgatggaactgctttaagtaaggaaccagcagataacggcatatggtatcgcttgcgccgatgtgaagctggccaagtccaagtgtgcctgagtctaaaagctggctttcaccgcgggcaataagattcatggcaggctcaatgtgctttaaaagcagggcaccggctgcggtgagctgtactttctttgtgcttctgatgaaaagagtctgtcccagcttcttttcgagagtcttaatagactggcttaccgcggactgtgaaataaacagcttcttgctggcttcagagaagcttagggatgttgccacgtagtaaaagaccttgtaaagctcataatttatatccattttgttatcctccgtataaatatggttatttgcatctgtttttatcaatgaggggcaaaataccttttgacccttatatcattatataagaaaactataattaacgcaacttataaaacaaattaaatatattaattatacttatcataactaaagtgttatactacaaccatagttttaaagtccgattgtgcaaaaagccggacggtaacgaataattggttacatactctcgaattgaaaggagaacatatgagtaacgtacgtcgtgtatatgtagagaaaaaacctgactttgcggtaaaggcaaaggaattaaagcatgagattaagcattatctgggaatcacaactgtggaggcagtacgtgtattaatcagatatgatgtggaaaatatatcagaggagacatacaagaaagccttgtatacagttttctcagagccacctgttgatgatatctttgaggagacatttgactatggtgatgcaaaagtatttactgtagagtttttacctggacagtttgaccagagagcagattcagccgagcagtgtgtgaagcttctcaatgagaatgaggagcctattatcagaagcgctatcacatatgtgattgagggtgctatcacagatgagcagtttgctgctattaagaagcactgcatcaaccctgttgattcgcgtgctatcggcatggaaaagcctaagacacttgtgcaggagtttgatgatcctgctgatgtcatcatatttgacggcttcaaggatatggcagaggacaagctgaaggagctttattcatcattgaatcttgccatgaccttcaaggattttcttcatatccagaattattttaagaatgaggaaaagcgtgatccttcaatgacagaaatccgcgtgctcgatacatactggtcagatcactgccgtcatacaacattctctacagagcttaagaatgtcaagtttgacgatggcttctaccgcacaccgattgaaaatacctacaaggattatctcaatacattttcaaatatctacaaggacagaaatgacaaatttgtctgtctgatggatcttgcacttcttgccatgaagagattaaaggcagagggcaagcttgatgatcaggaagagtctgatgagatcaacgcatgctctatcgtggtacctgttgaggtggacggaaagacagaggagtggcttgtaaacttcaagaacgagacacacaaccatcctacagagattgagccttttggtggcgctgctacatgccttggcggagcaatccgagatcctctctcaggacgtacatatgtatatcaggcaatgcgtgtaacaggtgcagcagatcctacagtaccggtttcacagacaattgaaggaaaacttccacagaagaagcttgtcagagaggctgctcacggatacagctcatatggaaaccagatcggacttgcaactggctatgtcaaggaggtttaccatccaaattatgttgcaaagcgtatggagatcggtgcagttatgggtgcggctccaagacgtgctgtccagagacttaactcagatccgggagataaaatcattctcctcggaggacgcacaggacgtgacggaatcggtggtgctacaggttcatcaaaggcacacaatacaaagtctacatcagtatgcggagctgaggtacaaaagggtaatgcacctacagagagaaagcttcagagacttttcagaagagaagaggtcagccatatcatcaagaaatgtaacgatttcggtgccggcggagtttctgttgctatcggagagcttgctgacggacttcgcatagagcttgacaaggtaccaaagaaatacgcaggtcttgacggaacagagattgctatctcagagtcacaggagcgtatggcagttgtagttgcgccttctgatgttgaacagttccttgcatacgcaaaggaggaaaatctcgaggcaacagaggttgcggtagttacagaggatccaagacttgtgcttgagtggagaggcaaagaggtagtaaatatctctcgtgcattccttgatacaaacggagctcatcaggagacagatgttgaggttgagatgccttgcgagagtgacaattatctggacaaaatcagcacacctgctgtagccaagatggttgaggcaggagatatgaagggtgcctgggaggcagagcttgaagaccttaacgtatgctcacagaagggacttgttgagatgttcgacggctctatcggagcaggcagtgtatatatgccatatggtggacgttaccagctcacagagacacagtcaatggttgcaaagcttcctgtattaaagggtaaatgtgatacagtaacaatgatggcttacggcttcgacccatatctttcatcatggagcccataccacggatctatatatgcagtgcttgagtctatctcaagaatcgttgcagctggcggagattacagcaaaatccgtatgacatatcaggagtacttccgcagaatgaacgaggatccaaagcgctggagccagccgtttgcagcactcctcggagcatatgatgctcagattggcttcggacttccttcaatcggtggaaaggattccatgtcaggtaccttcaatgatattgatgtaccgcctacactcgtatcatttgcagtggatgtggcaaaggaaaaggatatcatcacacctgagctcaagaaggagggcaaccagcttgttctatttacaatagataaggatgagtttgatcttccaaaatatgatcaggttatgacactttatacagcaatcagaaatcttatccaggatggcgcaatcgtttcagcatatgcacttgacggaaaaggcctcgcagcagcagtatcaaagatggcatttggtaacaagcttggtgtaaccatcgaggatgaggtgacaagcgatacactctttgcacctggctttggtaatatcgtagctgaggttcctgttaatgcactttcaaaggtcagagaggtaattgatgcagcaggtatttcagatgcagcctctgtagtcggctatgtaaacgataagcagactatcgagtgtgacgatatggtgcttcctgttgatgaggctgtcaaggtatggacagcaaagcttgagggcgttttccatacaaaggcaacagacgatacaagcaaggtaaatagcggtctttacgatgcaaagaatatctatgtatgcaagaataaagtggctaagcctacagtatttattccggtattccctggaacaaactgtgagtatgatagtgctaaggcatttgaaagagcaggcgctgacacaatagtcaaggtattcaagaatctcacagcagaggatatccgcgattcggttgatgagtttgtaaaggcaattgacaaatctcagattatcatgttccctggtggattctcagcaggagatgagcctgagggatcagctaaattctttgcaacagcatttagaaatgcaaagatgacagaggctgttgaaaagctcattaatgagagagatggacttgcacttggtatctgtaacggtttccaggcacttatcaagcttggacttgtaccatatggagagatcagacagcaggatgcacagtcacctacactcacctacaatacaatcaaccgccatatctcaaagatggtatatacaaaggttgtttcaaacaagagcccatggcttgcacaggctaagcttggtcagacctactgcaatccggcatcacatggcgagggacgtttcgtagcaccgaaggtgtggcttgataagctctttgaaaacggacaggttgccacacagtatgttgacttggacggaaatgtatcaatggatgaggagtggaacgtaaacggctcatacatgtctattgaaggtatcacatctcctgacggaagaatcctcggcaagatggctcattcagagcgtcgcggcgaatctgtagcaatcaatatctacggagagcaggatatgaagatattcgagagtggtgtgaaatattttaaataattcataactgaataattacaatatcttatatattcattgggctattatctctgcaatataaacaattaagcttccatggaggtcacggttagtggctttcatgggagtttttattttggaattagtgaatatgttggtggtaaagaaatatattgaaggtaattaaacacgtgcgtctgcttgatatttgatagtcgcagtggtaaaatcaagactaaaattaccggtagtaaagggtttgaaagaaaagaggacataaaataaatgaaattgccacaaataataaacagccttcttgagactgatatgtataaattcagtatgggacagacgattttccatcggttcacaagctataaaacgacatggacctttaagtgccgaaataaagacgtgcattttacagatgagatggtagaggagataaaggaacaggtgcaggccttctgtcagcttcgttttacggaggaggagcttgaatatcttgataacatcacttggataaaaggcacatatgttgattttttaagactctggcagccaagatatgaggagtttaccatcacaacagatgcaccgtgtgggctggcaatcgatgcagccggcacgtggcttaatacttcgatgtatgagattccggtgcttgctattgtaaatgaagtgtacttccgtatggcatatgattatgatgtgctgcttaaacagtttaagcgcaaacttgatgagaaggtgcgcctgctcgaggaggatacctacaggcttagtgatttcagtgaatttggactaagacgccgtctgtctgccgaggcacaggagatggctgtaaaggcactcgcagaggttgagctgcctgcagattcacactttattggtacatcaaacgtatatcttgcaaagaaattcaatttaaagccggttggaacaatggctcatgagtggattatgtgtacaggacagggcaatcacaagcataatccggcatattcaaactggtacgcactcgatgcatgggttaaggagtatggtatattaaacggtattgcgcttactgacaccataacaacagactgcttcctgcgtgattttcagctcacctatgcgacacttttttcgggagtgcgtcaggatagcggagatccgtacgagtggggagacaagatgatagcccactacaacagtctgggaattaatccaaggacaaagacacttttgttcagcgacagcctggatttcgagcgtgcgactgcattgtatgattatttcaaggataaagcaaaggttgcatttggtataggaacctttatcagtaacgacactgatgaggaagcactcaacatagttatgaagaccaccaagtgtaacggcatggatgtggcaaagatttccgacgtggcaggcaagggtatgtgcaagaatccggattatgtcgattacctgaacaggtgtattgattacaggatgaagaatgataaatgataaatgacggcattggggggcaaaggtattttgccccctttatttatgattaatcagattactacatgctacgcattcccgtaatctgactccacctcgaaatccgctaatttcctgcgtttccgcagcaaattgttactttctcggtgtagtgcggggcactaagatatacatcgaattgcatgcaagcatgcatcgatgataccttttgcccctttaatcatgtgattgaattgcaagaaatgtgtaaacaaaacaaaaaatatataaaatatcagacaatttaaaataaaaataaaaattatcaaaaaatatattgacaaataggcaaaattggtgtaatcttaaatcaacaaaaagagatacgaaaggaacaaaataaaacacaggaggtacagtccaatggggattacataatttaagtcaaagtactataaggatgattgaacggaatatttaaatctgtagggcgagccgaagagcagtaatcgcacagatatattagcaaataaataatatcgttgaaaaagttcttgtagattaaaagtgaaagatagaatctctcataagagtttacatagataatgtaaccaaaaggagtgattttatgaagaagggtagaggtccatagctaagctaaaagaataagaatcctgtcataaacagaatcatatttatagcaaagcaatatggaaatgccaaaataaattcatatagcgaaagcggagcttggaggttatacagtgaagcttacggaaccaatgttttaggagccacttgatgtaaaatgtagatcaggtggctcctatttttgacatttgcgaatgcatgtgaggtttaatagttagatagaatgacaacgtaagcctttaaggctggactataatttgatgaaagcaggaacgcggttttcaaatactgtatagtacataaacccggcatccttgaggatatttgaaaccttgtcaaaatcgtacgcgacatgctccggcttgtgggcatctgctccgactgtgattatttccccaccaagctcatgatagcgctttaacaccgcctcagtcggatttgggtggccaagcccgtatttaaagccggcggtattgagctcgatgccttttccctgtgagataatctcttttaaaatagcatcaattatgtcggcatacttttcatatgaatagtatttatttttgtcaggaccgtatctgaccacgtagtcgatgtgaccgtacacatcaaaatccgctccgctgtgcagattgtcaagtatcgattcaaagtattcagtataggcttcgtgctctgtcttacctttgtaaaatgcagggtagtatgggtcaatgccgtttactacatggcttgagccgatcacgaggtcaaacggatattttttggtgaccccattatttttgtctgtaatatgaggctgtaaaccgatttcaatgccccagtggatatttaccgggcagcccttttctttaagaacaattgcaagtcttttgatgcgcttttcatatgctgctatatcaagatcgaaaagcccgggctcctctttatagtcatagtccagatggtctgtaaagcagatgccgtccagccctttgttgattgctgattttatcatcaataccgggtcggcatcgctgtcacccgaaaacatgcagtgcatgtgttgatcccacatataaatacctccgtaaaactgatgtattattgttaaaaaactttataagttacatgatttataattgtctgctgctggctgccggaaagtgcgaattacagcaattaattaagtgtagccgagattataataaagtgcaatatctaaaaagaaaaattgtgaagaatgataaaaaatgtgtgtaaatgaaaatatttagtgaaaattttaacaaacgcaaataaagtacttgaacctttgagaattattcgctataataaaagcatcttagggcatgtccctaaaaatactttttacaattctaggaggaattaaaatggcagtaagagtagcaatcaacggatttggtcgtatcggacgtcttgctttcagacagatgtttggagctgagggatacgaggtagtagctatcaacgacttaacaagcccaaaaatgttagcacacttattaaagtatgattcatcacagggtaaatacgagcatgcagatgaggtttctgcaagcgatgattctatcacagtttgtggtaaggaaatcaaaatttacgcattcccagatgcaaacaattgcccatggggagagttaaaggttgacgttgtacttgagtgctctggattctatacatcaaaagagaaggctcaggctcatatcaatgctggagctcgtaaggtagttatctctgcaccagcaggaaatgaccttcctacaatcgtttacaatacaaaccatgagacacttaaggcttctgatacaatcatctcagcagcttcttgtacaacaaactgcttagctccaatggcagatgcacttaacaagtacgctccaatccagtctggtatcatggtaacaatccatgcttacacaggagatcagatgactcttgacggaccacagagaaagggagaccttcgtcgttcacgtgcagcagcagttaatatcgttcctaactcaacaggagcagctaaggcaatcggccttgttatcccagagttaaacggaaagttaatcggatctgcacagcgtgttcctacaccaacaggatctacaacaatccttacagcagttgttaagaaagcaggcgttacaaaagaggatatcaacgcagctatgaaggcagcagctaacgagtcattcggttacaacgaggatgagatcgtatcttcagatatcgttggaatgagatttggttcattattcgatgcaacacagacaatggttaaccaggtttctgatgatctgtacgaggtacaggttgtttcttggtatgataacgagaacagctacacatctcagatggttcgtacaatcaagtacttctcagagttagcttaattcttgtacccacaagaacagtatatctcaagactactcaaggggcgcggtcttaattgaaccgcgcctcttttttaaaacatggctatttcttttgaatatctgtgaattgtagaattaattatattttttaatatgcacaatatggcgtggccacatggcttatgccttgaaataagggaggacatattatgtcattaaacaagaaatcaattgatgatatcaacgtaaaaggcaagagagttctcgttagatgtgacttcaacgtgccacttaaggacggaaaaatcacagatgagaaccgtatcaacggagctcttccaacaatccagaaattaatcaaggacggtggaaaggttatcctttgctcacaccttggaaaagttaaaaacggaccaaacgagggtgagtcacttgctcctgtagctgcagctcttgaggctaagcttggacagaaggttacatttgtagctgactacaacgtaacaggagaggctgcaacaaaggctgtttcagagatgaaagagggagatgtagttcttcttcagaatacacgtttcagaggcaaagaggagacaaagccacaggaagccggagatgcattcgcaaaagagcttgctgaccttgctgatgtatatgtatgtgacgctttcggttctgctcacagagcacatgcttctgtagcaggtgttacaaagttcatcacagctaagggtggagagaatgttgttggataccttatgcagaaggaaattgacttccttggcaaggcagtagagaatcctgtacgtcctttcgtagctattcttggcggagctaaagtagctgacaagctcaatgttatcgacaacctcctcgagaaggctgatacacttatcatcggtggtggaatggcatacacattccttaaagcccagggctatgagattggtatctcaatgcttgatgagacaaagattgattactgtaaagagatgcttgcaaaagcagagaaacttggaaagaagattcttcttcctgttgatgcagttacaatcaaggatttcccaaatccaattgatgctcctgtagagacagagacatatgattatgacaagatgcctgcagaccgtgagggctgtgatatcggacctaagacacgtgagcttttcgctgacgctgttgcatcagctaagactgttgtatggaacggaccaatgggtgtatttgagaacccaacacttgcagcaggtacacttgcagtagcagaggcacttgctaaatcagatgctatcacaatcatcggtggtggagattcagctgcagcagttaaccagatgggacttggcgacaagatgagccacatctcaacaggtggcggtgcttcccttgagttccttgagggtaaggagcttcctggcgtagcttgtgctgatgataaataagccgaaagcagcttgatgaaatcgagccgcaggcaaaaaatatttgtatacaaatacaaggagatataaaatggcaagaaagaaaattgtagccggcaactggaagatgaacatgactccaagccaggctgttaaattagtagaagagttaaaaccactcgtagtttcagatgatgttgaagttgtttactgtgtacctgcaatcgacatcgtacctgttgtagaagcattaaagggtacaaatgttgctgttggagcagagaatatgtacttcgaggagaagggtgcttacacaggagaaatctcagcagagatgcttcttgatgcaggtgttaagtatgttatcatcggacattcagagagaagagattacttcaaagaggatgacgcacttctcaacaagaaggtaaagaaggctattgaggctggacttacaccaatcctttgctgtggtgagacacttgagcagagagagagcggtgttacacttgactggatcagacttcagattaagtcagatctcgcaggtgttgctgcatcagatgttgctaacatggttatcgcttacgagccaatctgggcaatcggaacaggaaagacagctacttctgaccaggctcaggaggtctgcggtgcaatccgtgagtgtgtagcagagatctatgatcaggctacagcagattcagttcgtatccagtacggcggatctgtaaatgcaggaaatgcagcagagctttttgcaaagcctgacatcgacggtggattagttggtggcgcttcactcaaggctgattttggaaagatcgtaaactacaagtaattattaaatcataatttaatatttgatttgacaatcacaataactaaatgtcactaaattcaccagcttagctgcatttagtggcatttattatgtaatgaaattttttgcgggcttgcatatgtcactgtaatagagcattttcaagcctcatatgaagaatagaggaaatataaatgagtaagaaaccggtagtattaatggtacttgatggttacggcttaagtgaccacaaagagggaaatgccatagctatggcaaatacccctgttatggataaattgatggcagagtgtccttttgtaaagggcgcagcttcaggtcttgcagttggacttcctgacggacagatgggaaactctgaggtaggacatatgaatatcggcgcaggccgtatcatatatcaggatcttacaagaatcacaaaggcaattgctgatggtgatttcttcaagaacaaggtattactttctgcaatcgaaaactgcaagaagaatgactccgatctgcatctttggggacttctttcagatggtggagttcacagccatatcgagcatctttacggacttcttgagctttgcaagaaagagaattttgacagagtatatgtacacgcattccttgatggtcgtgatacacctcctgcatcaggcaaggactacatcgagcagcttctcgccaagatgaaggaaatcggtgtaggaaagattgcatctctttcaggacgttactatgcaatggacagagataacaactgggatcgtgtgcagaaggcttatgattcactcactaagggtgaaggcgtaaaagctacatgccctgtaaaggctatggaggagtcatacgcaaatgacgttacagatgagttcgtgcttcctacagttatcacaaacgaggatggcacaccggtatctgttgtaaaggacaatgattctgttatcttcttcaatttccgtcctgaccgtgctcgtgagatgacaagagcattttgcgatgataagtttaccggctttgagcgcccattccttaagacaacatttgtatgcttcaaggattatgacgagtcaattcctaacaagcttatcgcttttgagaaggaagaaatccagaatacatttggtgagtatcttgcagcaaatggcaagaaacagcttcgtctcgcagagacagagaagtatgcacacgtaacctttttctttaatggtggagtagaggagccgaatatcgatgaggcgcgtcttcttgtaaacagtcctaaggacgttgcaacatatgacttaaagcctgagatgagtgctcctgaggttggaatggatcttgttgaggctatcaagtcagacaagtatgatgttattatcatcaactttgctaaccctgacatggttggacatacaggtgtgattccggctgctgtaaaggctgttgagagagttgattcactcgtaggtgatgcagtgcaggcaatcaaggatgtggatggagtattattcatctgtgctgaccacggaaacgcagagaagatgattgattatgagacaggaaaacctcatacagctcatacaaccaatcctgttcctttcattcttgtaaacgctgacccttcttacaagcttcgtgagggcggatgtcttgcagatatcgctccaacacttcttgagattatgggacttccacagccaaaagagatgacaggaaagtcacttatcgttaaataaaatttgtattatataagctccggcgcagacaaagggtttgaaccggagcttttgttttgatatattaaagatgtaataataaacataaggaatacttataagtgacataaaattatttaaaaaaacttataatatacgttgactttacaaattgagctggtatataatttaaaggtagcatttgatttgtaaaataaattacacataagatggaggacaatcatgcaggaatttaaaccattcaaagaaggaaaagtaagagaagtatatgataacggggacagccttattatggtcgcaacagatcgtatttccgcttttgaccatattttaaagaataagattacagacaagggagccatcctcacacagatgtctaagttctggtttgaattcacaaaggatgttgttcctaatcatatgatttcagtagacgcaaaggatatgccggagttcttcagtcaggacagattcaacggaaacagcatgctctgcaagaagcttgagatgcttccaatcgagtgtatagttcgtggatatatcacaggaagcggctgggtaagctaccaggagaacggtacagtctgcggaatcagacttccggagggacttgttgagtctgataagctccctgagcctatttatacaccatctaccaaggctgatcttggagatcatgatgagaatatctcattcgaaaaatcagtagaagtattagagaagatttatcctgagaagggcagagagtacgcagagaagattcgcgattatacaattgctctctacaagaaatgtgcagagtatgctcttacaaagggcatcatcatcgcagataccaagtttgagtttggcttaaatgagcagggtgaggtagtgcttgccgatgagatgctcacacctgacagctcacgcttctggccacttgatggatataagcctggacagggacagccttcatttgacaagcagtatgtaagagactggctcaaggcaaatccggacaatgacctacttttacctgatgaggttgttgtgaagactgtagagaaatataaagaggcatttgagcttcttacaggaagcaaattcagccgctaatatattatttattccgcgttactatttcgcaattataaacggagatattatgaaccaggacaataacataaatcagtatataaatacttgtatagatacaaaaagtcataccggtacaaaattaaaaaggtgttctgatattgacgagcataaccatgtatttgatgagcttcatgaggagtgtggtgtgttcggcatgtatgattttgatggaggagatgtctcatccactatctattatggtctttttgcacttcagcacagaggacaggaaagctgtggtattgcagtgagtgatacacacggaccaaagggaaaggtgacaacacacaagggtatgggccttgtaaatgaggtatttactcctgatatcttagagcctatgaagggcgatatcggagtgggacatgtgcgctattcaacagcaggctcatcaacacgtgagaatgcacagccgctcgtattaaattatgtcaagggcacacttgccatggcacacaacggaaacctcataaatgcaaaggagcttcgcaaggagcttgagtatacaggagctattttccagaccacaatcgattctgaggttatagcttatcatatcgccagagagcgtcttaactcaaaaacagcggaggaggcggtcagacgtgcctgccagaagcttaagggagcctacgcgcttgttgtcgagagcccgagaaagcttattgcagccagagacccatttggttttaagcctctttgcatcggaaagagagacaatgcatatatcgttacatctgagacctgtgcgcttgatacaatcggtgcagagtttgtcagggatgtagagccgggagaggttatcaccatcactcctgaaaagggcattgagtctgatatgactatggcacttgcccctgaaaaacaggctagatgcgtgtttgaatacatttatttcgcaagacctgacagccatattgacggagtaagcgtgtatggcagccgtatcaaggctggcagattccttgcaatggattcaccggttgaggctgatatcgtgacaggagtaccggaatcaggaaatgccgctgctcttggttattcacttgagtcgggcattccatatggcacagcatttgtcaagaacggttatgtcggcaggacatttatcaagcctaagcagtcaagccgtgaatcaagcgtgcagataaagctcaatgtattaaaggaggctgttaagggcaagagagttgttatgattgatgattcaattgtgcgaggaacaacctcagacagaatagtgcgtatgttaagagaggcgggtgccacagaggtgcatgttcgcatcagttcaccgccattcttatggccttgctatttcggtacagatattcctgcaagagagcagcttatcgcttacaacaggactattgaggatatcagacagattataggtgcagattctttaggctaccttggaattgacagacttcatgagatggtagagggactgccaatctgcatgggctgtttcacaggaaaatatccgatggagccaccgaaggatgatatcagaggcgagtattttgataaagaaatagacctcgagagaaaaatgcttaatcgctaataaaggagagaatatgagtacagacagatacacaagtcctctttctgagcgctatgccagcaaagagatgcagtatattttttcgcaggatatgaaatttaccacttggagaaagctctggattgctcttgcagagaccgagatggagcttgggctttcacaggatggcaaaccggttatcacacaggaacagattgatgaattaaaggcgcatgtggatgatatcaattatgatgtggcaaaggagcgtgagaagcttgtgcgtcatgatgtaatgagccatgtctatgcatatggacagcagtgccctaaggcagcaggaattatacatcttggagcaacctcatgctatgtaggtgacaatacagatatcatcatcatgaatgaagcattaaagctcgttcacaaaaagcttataagtgttattgcagagcttgcaaattttgctgataagtataaaaatcagccgactcttgcatttacacatttccagccggcacagccgacaacggttggaaagcgtgctacactgtggctgaatgagtttatgctggatctcgaggatttagagtatgtgcagggcacattaaagctccttggctcaaagggcactacaggaacacaggccagcttccttgagctcttcaacggagacaatgagacaatagacaagatagatccgatgatcgcaaagaagatgggctttaaggattgttatccggtgtcaggccagacctattcccgtaaggtagataccagagtagtaaatgtgctcgcaggcatcgctgcatcagctacaaagatgtcaaacgacatcagactgctccagcatcttaaggaagtagaggagccgtttgagaagaaccagattggctcatcagccatggcatataagagaaatcctatgagaagtgagagaatagcatctctttcaagatatgttcttgcagatgtaatgaatcctgcaattacctcggctacacagtggtttgagagaacacttgacgattcagcaaacaagcgtctttcaatacctgagggcttccttgcaatagacggaatacttgacctctgcctcaatgtggtggatggactggtagtatatccaaaggttattgaaaagcactttatggcagagataccattcatggcaacagagaacatcatgatggatgctgtaaagaatggcggaaatcgtcaggagctccatgagaagatcagacagctctcaatgcaggcaggaaagacagtaaaggaagagggaaaagaaaataacctcgtagacttaatcgctgcagatcctgcattcggactgacaaaggctgatatcgaaaagaaccttaagcctgagctttatgtgggacgtgcacctcgtcaggtagatgtatatctgcgtgatgtagttaatccggtgcttgaggcgcataaggatgagagtggagtaaaggcagaaattaacgtataatatcgaaagtatagataacggtaatttgcttgtgttaacatatttatctaaatgaaaagccccggtatataaatctgtttcaaggtttatatgccggggttttatatatccgtcaagtatcattttcctcgaaagctgtatatctcatcccataccttttcgcatgcactaagcaaaaggcgtgataatatcataatgtattttcttgtaaaataaaatggaaaaatgtataatattaaaaaatggtttagattatcaaaagaagagagtaaaaagaaagaatactagtgatgaaaaaattttttaatgaattcaaaaagtttatcagcagagggaatgtcatggatatggcagttggaattatcataggtggtgcatttaccagcatagtcacatccttggtcaatgacattataaaccctatacttggagtgtttggcggcatgaattttgaccagctctcggtaaagctctttggagaagctacattgtattatggaaagtttcttaccgcagtagtcaatttccttattatggcactcatcgtattctgcattgtaaaggctatgaatgcggcaggagagagatttggacacaaagaggaaaaagagccagacacaaaggagtgcccatactgtaagagcaagatagccattgcggcaacaagatgcccgaattgtacatcaatgattggtacagcagatgaaagtgaaaaatagcgatacatttattgcgtgaaactaataaaatccattgcataaagtgtgaaaatctgttacatacagtataaaactcttgactgtgcaataaaaacgtagtatattagttctgttatttagaattgaaattaggaggtcttatcgtggcaactttaaaaattgttttatcggtattatttataatcgtcagtttagtaattactatagttattcttttccaggagggtaagtcagcaggacttggcactatcgccggagttgctgatacatattggggcaagaacaagggacgttcaaaggaaggacgtctggttaaagcgaccattgtatgtgttgttcttttctttattatttcaattgctttaaatatgggaatatggtaaatacttagactgtcgagaaatcggcagtcttttttatcgcatcaacatccagatgatgaaattcgaggctttcgttgcaggttgatgtgatataaaatcaacattcataggatgaaaatgtcaatggtggaaattttatttaaagcctgtgcatttgaaatcagatggggcaacgaaaaggagagataatgagtaatatagataaatatgaaacacgaaaaaagatggtctatgactttatgtgtgatgacatgtatgttccgatgaaaatcaaggaactctgcatagtactcggagtaaaaaaagaggacagaccacagcttgaacagattcttttggatttgcaggcagagggaaggataacactctcaaagcgcgggaaatactcaaagtcggaaattaaaaagacagtcggcgtatttacagcgcatcaaaggggatttggctttgtcactgtggagggagagcctgatgatatttttatccctgcagagtatgtaaatggtgcgatgcacatggacactgttgagattacaatctcacctgtcacaacaggacgccgcaaggagggaaaggttgtttccgtcatagagcgaggcatgaagcaggtagtctgcacctatgaggcaagtgataattttggttttgcagtgcctgacaataccaggtttggcacagatattttcataccaaaggagcgctcaaagggtgctatgtcgggccataaggtagtggttgaaattacaagctatggtaaaaagggtaaaaagccggagggcaaggttgttgaaataatcggacatatagatgacccgggtacagatattctttctatagtaaaggcttatgatctgccggtggatttttcggagaaaatcatgcatcaggtgcagaatgtggcaaaggatgtgacacctgcggatatggccggcaggatggatttacgcgactggatgatggtcacgatagacggagaggatgcaaaggatcttgatgatgccgtgtctttatacatggatggcaacaattatgtacttggagtacacatagcagatgtgtcgaattatgtgcaggagcacagtgcccttgatgtggaggcacttaagagaggaacatcggtttatcttgtagacagagtaattccgatgcttccaagagagctttcaaatggcatatgctccttgaatgagggatgtgacaggctggctctttcatgcattatgacaataaataaaaagggtgaagttatcgatcataagattgcagagacagttataaagacaaaccgcaggatgacatacacaaatgtaaaaaagattcttgcagataaggatgccgctgtgattgaagaatataaggagcttgtgcctatgtttgaaaaaatggcagagcttgcagcaattctacgcaaaaagagaatgaaacgaggttctatagactttgattttccggagactaaagtcgtgctcgatgaagatggtcatccgatagatataaagccgtatgacagaaatgtggcaacaaagctcattgaggattttatgcttatagcaaatgaaactgtggctgaggattatttctggcaggaaataccttttgtatacagaacacatgacaagccggactcagaaaaaatcgcaaagctttccacatttatcaataattttggctatacgcttcatattggagctgatgaggtacacccaaaggaacttcagaagcttttgatgaaggtggatggcacagatgaagaatccctgataagcagactgacactgcgctctatgaaacaggcacgatatacaacagcatgtacaggacattttggattggcggcaaattattattgtcactttacatcaccaatccgcagatatcctgatttgcagatacaccgtatcatcaaggaaaatatccgcggcaggatgaatgataaccgcagggagcactatgagtctatactcgatgctgttgcaaagcaggcaagtgagactgaacgacgtgcagaagaggcagagcgtgaaacagtcaagcttaaaaaatgtgaatacatgtcaaatcatattggtgaatgctttgaaggagttatatcaggtgtcacggagtggggctttttcgtggagcttccaaatacagttgagggacttgtgcgcgtgacagacctgacagatgatttctatgagttttacgaggatacctatgagctagccggttcagccaccaataagagatacaagcttggacaaaaaatcaaggttgttgtggacagtactgacaaaattatgcgtacaattgattttaaaccggcggaataatatgacaataatgacgaaattttttatgatttaacaatacttatttgattagctgttatttgtcggtcgttgtgcgatagatttattgaaaaagatgtcataatatattatatagtgtaaataaacagaaatgtgaaccagcggtttacaataatttgcgttttagatattggcaattgtaaaaaaatgtgttagtattgtaaagcagtttgaggaaaggagataccgacatggctaaggaaccaaagaaattaatagccaacaacaaaaaggtctatcacgattactttttgcttgagaaatacgaagccggtatttcacttgcaggaactgaggtgaagtcacttcgaatgggaaagggcagcataaaggagtcgttcatccgtattgagaacggtgagattatcctgtatggcatgcatatcacaccatatgagaagggaaatatcttcaacaaggatccactcagacctaaaaagcttttgctccacaagaaggaaatcgagaagctttcatcaaagatgaaggaaaagggtttcacaattgtgcctgtggaggtatactttaaggggagtctggtcaaagtagagatagcacttgtcaaaggtaagaagctttatgataagagagcagacatagccaagaaggatcaaaagcgagaggcgcagagagatttcaaaatcagaaatcttggttagcaaaaaattaaatatgggctagtaaaggtttcgacggggcccacaaggtccggtggaccttggctttgggcggaccgaagcggagcggagaacatggagcgtagctgcatgtaccccgcaaaaaaaattgaatatgggctagtaaaggtttcgacggggtacatgcagctggagaagcgagtcgtatggcgatgcgttaaatggccaaattaaaattaaacgctgaagataatttagcatacgctgcctaatggcagcagtctgacctagagcactcacactttaggacccaggcttcgactatgtgagaaacgacgttggcaaagctttgagccatcgggcgtatcatgaagctactgaaaccacaaggttgtttgttatcgtgtggcagagggaatgttaaataataaactacactcgtagaaggacagggaattgtatttcggacacgggttcgactcccgtctagtccactaaaaggcggtttgcgataaaaccgccttttttcttgcccgatttcctacagcagaaagtgcggttaataaatcatttaaggagtcagtaaaactgttatttcaggttatcgaaaacatcgtaaaaacgcaggatatatcgtatttgaaaaattaatttaaaaaaatgtaaaaaagtgttgacaagtatggaatagggtgatattatatcgaagtcgcttcggtgaggcaacaaaaacgaaacggcaaaacagtatatcggggtgtggctcagcttggctagagcgcctggtttgggaccaggaggtcgcaggttcgaatcctgtcaccccgacttgtgaataattaaatatgcgggtgtagttcaatggtagaacaccagccttccaagctggatacgtgggttcgattcccatcacccgctctcgtgcaggggtatcgaagtggtcataacgaggcggtcttgaaaaccgtttgtccgcaagggcgcgtgggttcgaatcccaccccctgcgcttcatatagggctatcgccaaatggtaaggcaacggactctgactccgtcatttcaaggttcgaatccttgtagccctgcttgataaaaaacttaaaaaagttgttgacaaacacttgaaagtttgatatcatatagctcgttgttgcaagacaatgaactaaagaacattgataactgaacagtgagaaaccttgaaagattttgagaatcaatcagaacgcttcaatgaaaattggagacctttaaaacagtaaattcagatttatctgaataaacgaattagccaagtttaacttgactgagatcaacttttaacatgagagtttgatcctggctcaggatgaacgctggcgagccgaccgatgagccgaatcttgagcttaaatgtaaggtgtacaatataaacgacggaaagaacaaggctattatggagtcatgtggctggctgaatgattatatgacatttgtaaataaggtcagagagtatcatgcagacggggcatttgatgatcttgctatagatattgagaaggctatagactattgtattgacaatgatattctgaaggagtttctaaagacttacagaagtgaggtgacgaagagtatgcagttaaattatgaatttgacaggcagcttgagcttgaaagagctgatgctattgaagaggggatggaaataggagaaaataagatgctgtttactttagtaacaaagggaaagctcgatattgatactgcagcagaggaagcaggtgtcagtgtcagtgagtttgaaaaattaatgagtgaagcaggctataaggtgcctgagactgtgtagcatcaggcatgaataatttatcaaaatgtaaatagcaaaaatccgctaaccttgtatttggtatagcggattttttgtgccaaaaagtatcacatccgactgttattgtactgagctattgcatcggcaccgcctaacagctgtatgataagtatagctccaatccatggaaacaatatcgtaaaaattccaaaccatgcgccaagtgaatcgctgctatagtcccagaaaggcttgttcgggtcatcaagccagtacacatttatgatagtcctaagctcagaacgggtgctatgtcttttatcgcatgaaaaacgcttgcggtactcctttccgtctacagtatatgtgtatctggcagcccagtagctgtaagcggattgtgaattattgacaacgagcctctttgcatcctccttcacaatcatgcctcttgccacatgtccgcgctcctttgcaagtgctatcttgcgctgtaaaccaatatttagtttgtcgaaaaacttaaaatctatgatgtacagtggtattagtgaaagcaccccacatttacctgccacgggtagcttgcgatagccttaaaaacttctgaaaaagtgtccattgaaaatcccctttcttaatatgctgcatttgaatatatggtatgttaatattatagaaataaggaaggggattggcaatgggaaaagatatttctttcacttatgttttactaaatttaatctttaccccaaatttacatccaccccatttcgactttacaactttaagttatagtaatttcagcagctgtgaaatacactaacttaatttgtggaggaaaatatgagaaagaacaagaacatactgaagaagggcatgatccttgcagcagtttcaacaatggtagttaccatggcaccggcaattccggcttatgcttatggtgaagcagattcaaaaacaggtcaggcggcttttaatgcggcaacaacaggttcagcagattatcagagctggttaaccggtacatggcagggtggtacacaggactttgccaataccaataagattgcacttacaccgggctctacagccaaggatctgggctttgcatggtattcaaagaccaagggcacaccggctgtgatggtatggaaggatggctcaaaggcaggtgcgcagattgtaaagggtactgcaacagatataagcgcagaaaactggcagggggaagtctatgctgcttcaaataaagtaagcatcaacggtttttttgaaccggatacaaagtatgtttatcagtatacagacaattattcggacaatggtgataccatatggtcagatgagtatacatacaccacacacactacagatacattttctgtaatcctgacaggagatcctcagattggagcatcaggcagtaaaagtgataaagaggcaaacgatatgagcgttgcacaggatgcctacaactggaacaagacaatgcagaaggctatggagattgatccggatgcgtcatttcttttgtctgcgggagaccagataaatgagtcaaatgcagggtcggaagagacgaagaagacaagagagagcgagtatgcaggatacctttatccgtcagtattcagaagtcttcctattgcagctacaatcggaaaccatgacaaggacggctctgattacactgcacatttcaacaatccaaattcagatgataatctgggaagcaccgatgccggctgtgatttctacttcaataatggaaatgtattgttcatttctttaaacagtaataaccgtaatcaggcagagcacagagagtttatgaaaaaggctgttgcaagcaatccggatgcagcttggaaggtagtggtattccacagtgatatctatggctcaggacagccgcatgcagatacggatgctacaacaaacagaattatctttgcaccgctcatggatgagtttgatattgatgtgtgtcttactggtcatgatcatacatattcaagaagctaccaggtacaggacggaaatgttatcgactatgatttgagcaaaggttcggttaacaatcctgagggaactctttatatcacaacaggctcaggctcaggttcaaaatactataatctgttaaattacactccatactatatcgcagagagaaccaatgcgtgtctgccttcattctctactatagatttttcaagtggaacaatgacaataaagacatatgactacaacggaaataaatatgctgatgatttcacaatcacaaagacaacagatgcgcagagtgccgatgaggtgattgcggcagcagatgctctggtaaacagcacagatgtagcatacacagatgagagcatggaagcattaaaatcagcacttgcctctcttaaggagcttaaggcttccggcacaacagcagatgatccgatggtaagtgatatcacaacaaactatggaacagcaaatgaccgtgttaagggatatggctctatagcaaacgatgatgataaagatggtgcaaaaaatcgtttcaagaagggaatttctacacttcttgacaagacaatctatactcaggtagctgaaggcaaggaggaaaacctttctgattacagtgctgataaggctcctgttgtaaagggcatcgatgaggcaaagaaagcagttgtaagtgcaataaatgctttacaggttaaacagactgctccaaatgggaaccagaatggaaatgctgaccagagcggaaacggagcacaggacagcacaaaccagaacggaaacggggcacagggtggcgcaggccagcagattgcgggaaacaatgcaggcggatcaggaagccagaatgtcagcacagcaaatacaggtgcaagcaagtctgattctgatggcgtaaaaacttcaaagagtgctaaggtaaagacaggagatgttaaccatggcggcatgtatgcagcacttggagtattaggcgcagcaatcctcgtagcagtgcttggaatgagaaagaagggtaagttttggcaaaaataattgacacattaggcaaataccttattgtggctcttattacactggcaatgtttatatgctttcgaagcgttgaaagaaaaccgcttcttgcagatgacaatacatcgtttgtgagagcggtggttacgcaaaacgacaatgaagaccttcaggctgaagcctcactggatagcggtgacagccagaaggttgttttgcttatcaagtcaggaagccacaagggtgagacagttgatgcatacagcttaaacggatatttatacggtgccaattgtaaggtaggcacaagggttattgcgagtctgtcggagtacgatggcagtctgtcagcaaatgtttataactacgacagggaaaatgagatatgggtgcttttagcggcgttttttggacttatgtggctggttggaggaaagaagggctttaattcaattcttgcgcttatatttacctttgctacggtaatatttttgtatattccgctcatgtatatcggggtttctccgtttattgcggcaacagcttcggtcgtaattatcacggttgtcacgttcacactaatagcagactggcagatgaaatctataggtgctatgctgggaacagtttttggagttgtagtttccggaataatcgcattgcttttcggacacttcggacatgtgacaggctacaatgtggatgatattgaaaatctgatttatgttggccaaaattcaaagcttgatatcggtggcatgttgttttccggtatactcattgcatcgcttggagcagtgatggatgtggcaatgtctgtagccacatcgcttcatgagataaaagaaaagagtccggatatatctgcaaaggagatatttaagtcgggcataaatataggtcgcgatatgattggaactatgtcaaatacgcttattcttgcttatgtgggcggaagtctcggacttgtgatggttatatatgcatactcgtatcagatgcaccagatacttaatatgtattctatggcaatcgagataatgcgaggcatatcaggcacaatgggaattatcctgactgtgccgattacatcgcttattatgtcttttcttctgacaaggaaaaacaaggagtgagtagctgaaaatgctaatcaattacaagcccgttacaacaaggtatatcacaccaagcacccagcttgaaaatatgccgtacagtatcacaggacctgcaatcctgaatatctgacagcctatgccaaatacctgcccctccacctgaaattcacatgcggatgagcatactccgtttgcaaagcctgttataggaacgagagcgcctgcgcctccccagtttgcgagtggtgcatacaggtttagcgctgtcagtatgcagcttatgagaatcaaaatcatgctgcaccaggcagaggcttcatcgctgctgaatccaaagtattgcgtgcaggtatttactatgagctgtccgatagtgcatatgattccgccgagtataaatgccttaagcatgtttgcagaaaggcagtgagtaggtgtgacgcgctttacatatttgttatattcatcatttcgtttttctttttggtcagtagtcatgttttcagacctccttttttataggatgaccgtattttttaaatgtattcatatatgtgattttagttatttgatttgggtatagttacttattagaattaaatatgaaggatatatcaaataatccttgctactttctgctttaaatagtagaattgtagcaaggattatttttgcgcggtagcgcatcaaagtaataaatcacagcaaagcatataattgcgataaataatgcaagtattttgcaataaagaaaaggagacacatatatgtatacacttgacgacatcaagaaagaagatcaggagattgcaagcgccatcacagacgaatttgagcgccagaacagccacatcgagcttattgcctctgagaactgggtaagccctgctgttatgtcagctatgggaagcatcctcaccaataagtacgctgagggatatccgggaagaagatactatggcggctgcgagtgcgtggacgaggtagaggagcttgccagagaaagagccaagaagcttttcggtgcagagtatgtaaatgtacagccgcactcaggtgctcaggccaacatggcagtacagttcgccatcttaaagccgggcgataccatcatgggaatgaatcttgaccacggcggacacctcacacatggttcaccggtcaacttctcaggctcatatttccatgtagtgccttatggagtaaatgacgagggcttcatcgattacgacaaggtagaggagatcgcccttgagtgcaagccaaagatgatcatcgcaggtgcatctgcatatgcgagaactatagatttcaagcgtttcagagagattgcagacaaggtagacgcagtgctcatggttgatatggctcatatcgcaggacttgtagccgcaggacttcatccaagtccaatcccatatgcacatgtcactacaaccactacacacaagactctccgtggacctcgtggaggaatgattctctgcagtcaggagatgcaggataagtacaatttcaacaaggctattttcccgggaatccagggtggacctctcatgcacgttatcgctgcaaaggcagtctgcttcaaggaggcattacagcctgagttcaaggagtatcagaagcagattgtaaagaacgcacaggcactttgcaaggggcttcagagccgtggcatcaagattgtatcagacggcacagacaaccacctcatgctcgtagacttgactccgtttggtctcacaggaaaatctatcgagaagcttctcgatgcggctcatatcacagccaacaagaatactattcctaacgacccacagaagccatttgtcacaagcggtatccgtctcggaacacctgctgctacatcaagaggcttaaaggaggatgatttcgacaaggttgcagaggcaatcgccatgatcatcaaagagggcgagagcgcagttgagcctgcaaaggctatcatcaagacacttactgacaagtatcctcttgcattttaagggttttcagagtaaaatgttataagttataaaaacataatactttggaggaattatgatagacttaaagtttttaagagagaatccggatctcgtaaaagaaaatattaaaaagaaattccaggaccacaagcttccgctcgtcgatgaagtaatcgagtatgacaagaaggccagagaagcacagcaggaggcagatgatcttcgtgcaaagaagaatcaggtttctaagcagattggtgctcttatggcacagggcaagaaggaagaggctgaggctgtaaaggctgaggtagcacagatttcaaagcgtctcacagagcttgagccgctcgagaaagagtatcaggacaaggtgcttgaggatatgatgaagattccaaacatcatcgatccatcagttccaatcggaaaggatgataccttcaacgtggagaacgagaagtttggtgagcctgttgttcctgatttcgagattccttatcatacagatatcatggagagatttgacggaatagacctcgatgcagcaggaaaggttgcaggaaacggtttctattatctgatgggagatatcgcacgtcttcactcagccatgacagcatatgcgcgtgacttcatgattggaaagggctttacatactgtatcccaccattcatgatccgttcaaatgtcgtaacaggcgttatgagctttgaggagatggatgccatgatgtacaagattgagggagaggatctctaccttatcggcacatctgagcactcaatgatcggtaagttcatcgatacaataaacgatgagtcaaagcttccatacacactcacaagctactcaccttgcttccgtaaggaaaagggtgcacacggcattgaggagagaggtgtttaccgtatccatcagtttgagaagcaggagatgattgttgtctgcaagccacaggattcaaaggaatggtatgagaagatgtggaagtacacagtagagcttttcagaagtctcgatgtgcctgtccgtactcttgagtgctgttcaggagacctcgcagatctcaaggttaaatcatgcgacgtagaggcatggtcaccaagacagaagaagtacttcgaggttggaagctgctctaacttaggcgatgcacaggcaagacgtcttaagattcgtgtaaagggcgaggatggcaagaaatactttgcacatactcttaacaacacagttgttgctccaccacgtatgcttatcgcattccttgagaacaacctgaatgcagatggctctgtaaatatccctaaggcacttcagccatacatgggtggtacagagaagcttattccgaagcactagtttttgaaataaattagttcatgtaaatataacagccgtagctgcgattgaaaaaggaaatcgcggttacggctgttttgttttttcttatcaggtaagggaagatttctaatgaatttacagagaagaaaatcccttaccaaatacttcactggtgctcatcacagacataaaagcatgcagcttattctgatgtatgaagcttctaagctctatggcctgcttctttgtgagagtgctgaaaacgatatagtttctctcaccggtgtaagcacctcgtgcctccacatatgtggcacttttctccagcgtgttagtaatatagtcgcatatcacatccttgtcatcgcagataagcattatggattttctgagcatgatattttcgatgattgcatcaatcataaatgatttcacaacaagtccgacaaatgaatacagagcagtctttatgtcaaatacaaagcaggcgatgatgatcatgacgaggtcggtgagaaataaagccatgccaatattttctacatgtgcatatttttttacaatcatggcgatgacatcggttccgccacttgaagcccctacatagaaaagcagtgcagatgcgattgcaggaagagcgatggcaaaaatcagctcaagcattggctcgtttgagagaggatgagtgagcgggtcaagtttttcgagtaccaggagctcaacagacaaaagtattgtggcataggtggtcttaatagcaaagcctttgccaaggaagaaaaagcccactacaagcagaagcatgttcacaatagtagaaaacatactcgctgagagcggcgttatctttgcaaaaacaactgcggcaccggttacgccaccgaaggtgaagttgtttgggaacttgaaatagtatacaccgattgccatgatggtgatactgagtgtcattatcagaaaattttttatctgtttaagcatttgttgttctcctttatgatttgacagcttgtcaggtatttattgcagtgctgtgtatcatagctttcttttgtattattaatcgttcaaatctaaatatttatttgcatggttagtgtaggacgatgaatgtctgatgtcaatataatccgtgaaataaattataagtattatttctataaaagatatattatattagtaaaactaataagaataattacaatatataattggaaaatttaacactatgaaggtatactataggtattgaacgaattgcagattattaggaggaacaataatggattacaagaattctggtgttgatatcgaggcaggttacaagtcagtagagcttatgaaaaagcatgtaaaggagactatgagaccggaggtgttaggtggtctcggaggcttctcaggagcattctcacttgcttccatcaaggatatggaggatccggtgcttttatcgggaacagatggctgcggaactaaggtaaagcttgctttcatcatggacaagcatgatacaatcggaatcgatgcagttgccatgtgcgtaaatgatgtggcatgtgcaggcggtgagccattatttttccttgattatatagcatgtggaaagaactatccggagaagattgctacaatcgtaagcggtgtggcagagggctgtaagcagtcaggctgtgcactcgttggtggtgagacagcagagcatccgggtcttatgcctgaggacgagtatgaccttgcaggctttgcagttggtgtggttgacagaaaggacatcatcacaggcgagggattaaaggatggtgatgtacttatcggaatggcatcaacaggcgtacactcaaatggattttcacttgtcagaaagattttcaagatggacaaggagacattaaatacatatcatgaggagcttggcactacacttggagaggcacttcttgcccctacaagaatctatgtaaaggctcttaaggctgtaaaggacgcaggagtcacagtaaaggcctgcagtcatattacaggtggcggcttctatgagaatatcccacgtatgctcatcgatggcaaacgtgccgtagttgagaaaaacagctaccctgtcccaccaatctttaaaatgatggctagagagggaaatgtcgaggagcagatgatgtacaatacctacaacatgggacttggaatgattgtcgcagttgaccctgcagacgtggacaagactatggaggctatgaagtctgccggagatacaccatacgtagtcggaaagattattgacggcgagaagggggtagatctcgtataattacattcaaatgaggggcaaaatactttttgaccctcatatcattatattgttaataacgtatacatcgttgtgaggaaaaagaatgaaaattgcagtatgtgtatcgggtggcggcaccaatcttcaggccatcatagatgcaatagataacggaacaattacaaacacacagatagaggttgttatcagcaacaacgcagatgcatatgcgcttgagagagctaaaaaggctggaataaaggcagtatgcatctcgccaaagaattatgaaagcagagctgccttcaatgaagatttcttaaagcagcttaactcatatcatgtggatttagtcgtactggcaggctttctggtagtgattccacctgagatgataaagcagtacagaaacagaatcataaatatccatccatcgctcataccatccttctgcggcacaggctactatggtcttaaggtgcatgagggagtgcttgcacgcggtgtgaaggtgacaggtgccacatgccactttgtggatgaaggcacagacacaggccctattattttacagaaggcagtcgaggtaaagcagggcgacacacctgaggtgcttcagcgcagggttatggagcaggctgagtggaaaatcatgccacacgctatcgacctgatagcaaatggcagggtgtcagtagaagacggacatgttattatagatgagaagtaatgacagtgctgtaagtaattagtatgtaaacatagatagattatgattaccggacaatgaaaagcttatatatagcttaagtataggaggcaaaaatgaaggtattagtagtaggaagcggcggaagagagcatgcaatatgcagggctgttgcaaagagctcacgcgttgacaagatatactgtgcaccgggtaatgcaggtatcgctgcacttgcagagtgtgtgccaatcggtgcgatggaatttgataagctcgtatcatttgcaaaggataatgccattgattttacaatcatcggtatggatgatccgcttgtaggaggtatcgttgacgagttcgaaaaagcagggctcaagtgcttcggaccaaagaagaatgcagctattcttgagggctcaaaggcattttcaaaggatctcatgaaaaagtataatatccctactgcggcatatgagaattttactgatgccaaagaggctcttaaatatttagagacagcaaagttccctatcgtgttaaaggcagacggacttgctcttggaaagggtgtgcttatctgtaatactcttgaggaggcaaaagatggtgtcagaaccatcatggaggataagaagttcggaacagccggaaacaccatggtagttgaggagttcatgacaggccgtgaggtttcagtgctttcatttgtagacggaaagactatcaagattatgtcatctgcgcaggaccacaagcgtgcaggcgatggagatacaggccttaatacaggcggcatgggcaatttctcacctagtccgttctatacaaaagaggtcgatgatttctgcaagaagtatatttatcaggcaactgtagatgctatggctaaagagggcagaccttttacaggagttattttcttcggactcatgctcacagaggatggaccaaaggtgcttgagtacaatgcaagattcggagatcctgaggcacaggttgtgcttcctcgtatgaagaatgatattattgatgtgatggaggcctgtgtagacggaactcttgacacaatagatcttcagttcgaggacaatgcatgcgtatgtgtggttctggcatcagacggatatcctgtcaagtatgagaagggctttaagataactggctttgagaagtttgacggcaaggatgattattactgctatcatgccggcaccaaatttgatgatgacggaaatattgtcacaaacggaggacgagtgcttggtatcactgcaacaggcgccacactcaaggaggccagagccaaggcttacgaggcaacagagtgggtacagtttgataataaatacatgagacatgatatcggaaaggctatagatgaagcataagggtattatttttgatatggatggaactctctgggattcagcagagaatgtggcaaaatcatggaataaggccatagcagattatggctatgagagggcacctatcacaaaagaagatatgtattcagtaatgggaaagacaatggatgtactggcatccattatctttcctaattgtacttgcagagatgagttaattaatgtatgctatagagaagaaaacgattacctgaccgctcatgggggagagctttatcctgatgttgaaaatacacttgatgagctgtcagaaagatatgacctttatatagtcagcaattgccagcgtggttatatagagtcttttttttcgtaccacggacttggcaggtattttaaggatactgagtgctacggtaacaatgagcttgaaaagtcagaaaacataaagcttattgtagagcgcaataatatagatgaggcagtgtatgtaggtgacatacagggagactacgattccagcaaaaaggcaggagtaaagttcatccatgcagcatacgggttcggcacaatagatgacgatgtgccggctattcgcaaattctctgagctgccgcaggtggctgacagagtatttgatgaaattgaaaagcactgatgagaatttagtttgaagccgtttacacttgatgttttcacgagtgagttcgtggaaaaacaaggaatcaattgtgattcacaattttatatacaatgcagctattaacaggcgcctgtagcaggaaaacggataacagctgcaaaaaagataaaaggaaaggaagaaaaatgttagagaaaatcttcaaactcaaacaaaacaacacaacggtaaagacagagattcttgccggtctgacaacattcatgaccatggcatacatcattgctcttaacccaaacctcctcaccggatttggtgctgagggaacaaaagcattatggaacggagtgttcctggcaacatgtattgcttcggcagtcggtatgtttgtcatggcatttcttgccaacaagccatttgcactggctccgggtatgggacttaacagcttctttgctgtagtagttgccaatattgtaagcatcacaggcctgtcatatgttgattcattccaggctgcactgtgtatcatccttattgagggtattttattcttcatactttcaatattcaatatccgtgacaagatagtagatgccattccttatggtgtccgcatgggtatttcaccggctatcggtcttatgcttttaaatatcggttttggatcaaatgccggtgtttactcaaaggatggtggaccattttatgtgatgaaggatttcttcggtgcactcacaccgggacttgccaaaacaaatatgacagatggatattcttcaatggtgctcactgttgtgactatgttcatcggactttttgttatcattattttagctcataagggcgtcaacggagcagtactttttggtatgcttgcagcctgcgtagtttactgggcaggagaggctatattctttggaacaaatccttttgcatcacttgcaacagcttcatttgtgccacagtttaaggatatggcagatacaacactgttcaagttcgatttcaaggatttcatcagtattggatggtttacagcaatttcactcatcatcacattttgtatcatagatatgtttgataccatcggaacacttgttggtactgcatcacgagcaggaatggttgacaaagagggaaatatgccaaacatgaaggaggctttggtttccgattcagttgccacagtggttggtgccgtaacaggtacatctacagtaacaacttttgttgagtctgcatcaggtgtagaggccggtggacgaacaggtcttacagctttcacaacaggtatcctgttccttgcatgcgtctttatagcaccgcttgcagcaatcattcctgccgcagcaacatcatcagcacttatctatgttggtatcctgatgcttggcggtcttaagaaggtggatttcgaggatctctcacaggttgctccggtagcactcatgcttattgcaatgcctatctccggatctatcggacatggtataggtcttggacttatcacatatactgtactcaaggtctttacaggaaaagcaaaggaggtttctatccttacttatgctatttcgcttctcttccttgtgaagttcttccttgtagtgtagtgttttaaagcttagtgattcatagtggttattagtacgaaaatgatataattagcttttatgtgccgtccatggcacataacgccttgccccgccattcttggcggggcattgttgtgtgaggatataattcacatatacaaacatatgttcttgacattttagagtaatcaatgtaaaattgcagtatggataagcataatgaagagcacatttatgtggcaatagatttaaaatcattttacgcatcagtagagtgcagagagaggggaaaggatgctctgaccactaatctggtcgtggcagatccaacccgcacggagaagactatctgtcttgcagtatcgccggctcttaaggcatatggcataccaggcagggcgcgcctttttgaggtggtacagcgtgtgaaggaggtaaacaaactgcgtctgtcgaagcttatggcgagtggacatgctgccgggacagtggagagaagccgacaaattgagggcgaacaatctgatagaaaacaatcagcaggtgaacagcaaaaaagactccagactgagggcaatccggatgagagaaaaaaatatgtaacagaaattgatatagcagaaaatgatataacagaaagcacaatggccggctttgattatgcatcatataatgcgaagctgcttgacgcacatcctgagtatgagctgacatacattgttgcaccgccgcgtatggctttgtatatggattacagtacacgcatatacaatatttatcttaagtatatcgcacctgaggatatcagtgtttactcgatagatgaggtttttatggatgtgacacactatcttcgcacttatcacatgacggcaagagagcttgcatctaagatgatagacgatgtccttaaggataccggtatcacggcaacctgcggcattggtaccaatctgtatctgtgcaagatagccatggatattatggcaaagcatgccaagcctgatgagcgaggagtgcgtatagcagagcttaatgaaaatagctataggcgaaagctatgggaccacaggccgattaccgatttctggagagtgggagcaggttatgccaaaaagctcgaggcagccggcatgtatacaatgggagatgtggccaggtgctcaacaggcggttcgaatgaattttacaatgaggaaaagctgtataagatgtttggcatcaatgcagagcttcttatagaccatgcatgggggtatgagcctgttacaatagctgatatcaaggcatacagaccacagaccaacagcatcagttcagggcaggtgcttcaggagccgtatgattatgagaagacaaagcttattgtgcgtgagatgacggaccttcttgtgcttgatctggtagataagaggctggttacagaccagatagtactcactatagggtatgatattgcaaatctgtctaataaggctgatcgctgttttggcaataattatgaccacgcagttaataaaaaaggcagagacagtattggcggtaaaaaaggtacacacagagattatacaggtgagattaccatagaccgatacggcagaaaggttccaaagcatgcacatggtacagcaaatttagggcgttatacgtcatccacgcgcatcatcatggatgctgtgatggagctttatgaccgtatcatagatccttctcttctgacacgaaggattactgtggtggcaaacagggtctgtgatgagagcaaggtgcaggaaagtgagcagtttgagcagcttgatttatttacagattatcaggagagggataaggaaaagcagaaagaggatgaggcgctttccaaggagagaaagcttcaggaggctatgatttccgtcaagaagaaatatggaaagaatgccatgctaaagggaatgaatcttgaggagggtgccacaactatttcaaggaacaatcagattggcggacacaaggcatagcagcaaccgctgtggttcttaatcggatttttcttagtggtttaaaatagttacgaaaaagtatataaggagcatggcatgggaaaatatgatgatattatagatttaccacatcatgtgtcaaaggtacatccgcagatgtctatatgggaccgctcagcacagtttgcaccttttgcggcacttacaggtcatgaggaggctattgcagagacagcgaggctaacaaacgagtggcatgaacctgatgaggacaaaaaaagagagcttgatgagaaaatgaatgagctcatgatgctttatagaaagcgtaatttcaattcagacggtttatatgacgaaaatgtcataaacaccatggcagagaattattttgaggtgacatattttgtgccggatgagcacaaggagggtggcagctatgagcatgtgacagggtatcttaaaaagcttgatagcatagggcacctgatgatagttgtggatgataatggtgcagagacggtaattgatacaagaagaatatatgatatcgatttgtgatgattttgtcaggaatgtattacttgtaaatgtggtatagaaagcaggaaattgtaaagatggacaagcagatggaaagagccggtgatgacaataaaaataatattggtgtgttatatggtatcggtgtaggtccgggagatcccgaacttatgactttaaaggctatcaatacaataaaagcatgtgatataattgcaatccctgcagtttcaaaagaagaatgctatgcgtacagcatagtgcaggctgttttaccggagatagagaaaaaacatattatgtgcactccgtttcccatgataaaggacaaggaaaagcttactatatcacacaataagatatacagtgacatagtaagtgagcttgaagatgggaaaagtgtggcaatgcttacaatcggcgatccaagcgtgtattcgacatatatgtatatccataagcgtgtcatgcaggcaggttttacggcagtgatgataagcggtgtgccgtcgttttgtgcagctgcagcgcggcttggcatttcgcttggtgagatgatggatgagatacatatcataccggcttcgtatgatgtgagggatactgtgggctatggtggaacctgtgtatacatgaaatccggaaagaagctagcagagcttatagaggtgcttcgcacaggagaagctatcagaaaaaagaaaatgacagtgtatggtgtgacaaactgtggtatggagtctgagcgtgtgtacagggggctggatgagcttaccgaagcaaaaggatatctgacaatagttatagtgaaatatagctaaaatgggagtttactttttgtgcataattgctataatagtatagtgaaccgaatatttatatatattttaatatagaaaagggctgaaatatcacatgagtatagtggataaatttggagaaaaagtaggcgaaatagcagaaaacgatcctgtcaaggcaaggaagcttttacttgcaggatatagattacaggaaaagagattagcattatttccggacagaaagcttccaatgtcagggcagtatgtggcaaagattgtcatgaataatatcatacaggcacttgcaaagcctgaaaatgccgccatggtcagtatttttgtaccgggcgagcttttgacggcggcaggtctcacgccatattcggttgaggcattatcgtgctttattgcaggaactaaatgcgagcaggcctttctaaggcagactgagaaggaaggctttccggaaactatgtgctcgtatcacagggtttttctgggcgcagccttaaacggtatagtgccaaagccaaagtgcatggtgtatacaaacctggcatgtgatggcaatatgatgacatttccgtatctcaaggagagatatgaaataccaagcttttatatagatgttccatatgagaagaattatgactctgttatgtatgtagcaaagcagcttagggagcttaagaattttttacaggatgtcaccggaagagaaatcacagaggagtctgtgaaaaaggctgtggacaagagcaaaattgcatcaaataattattacaggcagcttcacctgagaaaaggacatgatattgcatcaactctcacaaatgagctgtatgcgcttttcatgtgtcatctgcttgcaggaactgatgaatcagtcagatatacacagcttctgagagatgatgtgagacgtgcaccggcaggcgatggatttcatgtactttggatgcacaccatgccgtttttgcaggatgcagtgaaggatgtgttcaattacagtgacacgatccatatcagtgcaagcgattttatagcggatggtttcagaagcatggagtcggatgatccttacgaggcacttgccgaaaaaatggtttactgcatttataatggcagcgtgaaccagagaatagaggaggcaaaggagcttgccgacacagttggagcagacggtgctgtactttttgcgcactggggctgtaagaatacaatcggtgcatcaagccttataaagcgctcactcgagagggaaggacttccaactatggttttagacggagacggctgcaatccggcaaatgccagtgacggacagatttccacaaggcttcaggcatttgtggagatgcttacagagcaggaacgtaattagaaataatacatcggttatttcgtgcggtgtgtggatatttactataaatcaatttcagaaagtggaaaacagatgataaattatgtttgtaaatatgctccggtagagctgtttaagggctttggacaggaatgtgctgtgcttgaggagatgccggagaattttgataaatcagataagatagctcatgcgaatctctgcggattcggcaaatcagtcatacaggctgtgctcgagggcaaggtagaggagcttgtgctcgtgaactgctgcgattcaatgcgcagagtctatgatatcatagagaacacaaagaaatgcaaattcttgtatatgcttgatctgcctcatgaggataacgagtgtgagaatataaaatttgcacagtcaattcttcgtttgaagaatgcgtatgagagatattcgcacaggacattcgacagggagctttttataaagtcgtttgcaaaacctgaatctgagcgcaagccatacataggtcttatgggtgtgcatgtgagcagtattcttgagaagacaatacgtgaaaatatgcagatggatgtggaaaatatgacatgcacatccggcagaaatctcattattttacagaaggatcttagaaatatggatgatgagactctctttgtagcatatgcagagagtctgctcggacagatgccatgtgccagaatgaacaataatacaagaagaaaccagctctttttagacccaagtcttaagggcatcatatatcacacgataaagttctgcgattactatggttttgagtatgcaagcataaagaataatattaaggtgcctcttttaaagcttgagacggattttacaagccagagtgccgggcagcttctgacaaggatacaggcatttgcagagacaatagagggctcagatgacatggaccctacaaaaggcataagcgaggaggctagaaaaaggatggaatcaggagtctattatgtagcaggaattgacagcggctcaacaagcacagatgtggtgatactggatcaggacggaaaaattaaatcgacaatgattattccgacaggtggcggcgctatgatgagcgccgaaaagagtctggagaaggctgtagaaaaggctggtatatcaaaggatgatattgtaaggattgtaacaacaggatatggacgtgcatacatcaacagcggcgatgacagcatcacagagattacatgccatgcaaagggcgcgcattatctgaatccaaacgtgcgcacagttattgacataggtggacaggatataaaggcaatcagtatagatgaaaatggtgcggtcaaaaatttcctgatgaacgataaatgtgcggcaggaaccggacgttttctggagatgatggcaaggacactcggactttcactcgaggagatgagcaccatgggacttgattggaaggaaaacattgtgatttcaagcatgtgtacagtttttgcagagtctgaggtagtatcgctggtggcacagaacaaggctgtttctgatattatccacggactaaacatgtctgtagcttcaaaggtaggcgcacttgcagcaaggcttgggcaggataatccgggagagtatatgatgaccggcggagtggcaaagaacaaaggcatcacaaatgcacttgaagaaaagctcagcgcaaagctgtatatttgcgatgaggcacagctttgcggagcgcttggtgcagcactttttgcatatgagaagtgcagggaggcttaatagagggactatagcaaaccaccagttgaactggtggttgctgactttattccatgattttcccatcaatacttattgttacaacctgccatggtatgaattttccactagcttgaagagcttttttggccgcaatctccaggccgccacagcaagggacttccattcggacaatagttacactttgaatgttgttattttgaataatagcagtcagcttttcactataatccacctgatctaatttaggacaaccaattaaagttaccttgtttcgaataaaatcctgatgaaaggcggcataagcgtaagcagtacaatcagctgcgattaaaagctttgagccgttaaaatatggtgcattaacaggagccagtttaatctgtaccggccagttttgaagctttgatcctgaatctgcggctgaagtggcttttacaggctcagatgtttcagttcgtctgatctgcatgattttagatccaggacagccggagtgagaggatattgcccggtttttggcagctattttcttctgagcttcttttacggcttcttcatcatatgcaggtgcttctctctcctcaaatgagatggctccggtagggcattcagggagacaatctcccagtccgtcgcagaaatgttctctcaccaattctgcttttccgtcaatgatatcaatggcgccttcgtggcaggcagatgcacaggcaccacagccgttacatttttctttatcaatctttataatctttcttatcatttttaacctccgtcaatagtatttagcgtttgtttatgctagaattatagtattataaatacaactagtatgtttgatttccaacagggaggaactattttgcaaaaatatttatcaatcctaagaaacagtccattttttaaaggtctaactgataacgagatattatccatattgcattgtgtaaacgcaacaacaatttctaaaaagcgagattcttatattttcagagcaggtgatattaccgaagtaatggggattgtggtgtccggctgcgtcctcattattcaagaagacatctggggacatcgaaatattttgtcaaaatgtcacgcaggagatttttttggtgagccgtatgcagcaagccagagagctgtcttaaatatcagtgtggtagcagatgaggattgtgagattattctcttaaatgtcaaaagacttctgattacctgtccaactgcgtgtgagcatcatcagaagctgatccgtaatctggtcagtgtcctggcaaataagatactgattctgaacgataagatcacacatgttgggaagcgaacgacgagagataaactattatcatatctgtcggcagaatctatcagacattcgtcgttatcttttgatattccttttgataggcagcagctagcagattatctttgtattgatcgtgcagcaatgtctacagagatatcaaagttacaaaaagagggctttataaaaacaaatcgaaatcattttgaattgcaattgagtataatcaaaaagaagaactatacaatttaggcaatggttgcatttttcggaacgataggaaatagcaatacaagttgtaggcaggtggctacccagtagcagatggaccgattttgaaaaactctgtatcaattttctttacagtgttcatagatttatggtataatcagtctaaacgcttgaataaaggagattatccgggaagaaaatgagaaggcgcagacggaatgattctgtaattccgtcacttcatgggagataaatgttatagtgaatttatagtgaatagagaaacgcgatagcgtagtaagcaataatttcagatgatcaaggtttgatcagagaggagaagaatatgaacaactattgtatgatccagaactctaaaacgtttgcattttccgcagagaatccaaccggtgtacgcgcaggtggttcccagggcggtgactgcaccaagcttcgtccaaccgtgacgattcatgcaggggagaccgtaactctggtagatgctgcaggaccgggtgtaatccagcatatgtggttcaccggatatgttgggcaccattttatcatccgtatgtattgggatgatcaggaatatccgtctgtggaagctccgctctctgcattcttcggatgtgcctatgatgaaaatttcgtggacagggatggcaaatatccggtgttgaattctgccatgatgctggtagctcctggtcgcggctataacagctattttgagatgccgttccataagagagctcggatcacgatggaaaaccgtggtgacaaggatgaagagctcttttatattatcaccggagcttatcaggagattccggcggaggctggttatttccatgccacctatcgccaagagcacccggttcagaagggtcgtacctatacaatcgttgacggaatcgaaggcaggggacaatttgttggtgtgactctggcaactggtatgaatggcaacaatacctgttgggtagaaggcgaagcccgcatgtatctggacgatgatccgtatccgtctatccactataccggaactgaagactacttcggcggttcctatggatttggaaatgacatcatcatcaagagctatcagaccttcagcggcttatataccggcatgtatgcaatctatggagacaacagggaattctataacggacagcagagattcctgctgtatcatttccatattgcagacccgatccgttttgagaataagtttcgtatgacactcgacaacatgggctggaccggaccgcgttacgatgattacaccagtgttgcttattggtatcagaccctgccgtccgcaccgctgatgccactgccgacagatgcagagatgtgtatgagataatagaaccagattggagatgtcagatagattggttttaaccttgcgacacgtcgcatcggttatatcggactgacatcagagatttgccggaaaggatagaggtattatgttactggaagagaagtttttggaatttcatcgttatgtcagcagccacaatctgccgctggaagctatcagtgtcggagatgagaacaaggtactctgtgagatgcactacgcagcaaatgcaccgagaaatatttattcacataccaagagttttacggtaacagcagttggactcgcaattgaagagggaaaactaagcctggaagatcatgtggcggaagtgtttaaagataaacttccttcaaatccggatccaaatctggagaagattcagttgaaacatctgctctgcatgtccagtggctttggtaaggcacttctgatgaatgcggacagacgtccgggcgtcggcgcaccggattatgagaaatatatgatggcacagccggttcctgtggagccaggcagtgcattctgctattcctctgccgacagtattctggctgctcatatggtagaacgggccgttggcaagcggatgggagagtatctgtatgagaaggtattccagccccttgatatgggatggccgctctgggagcatgatccacagggacatccgaatggcggcggaggtatgtatctgacttgtaccgagatgatgaaactgggacagctctatctggctgagggtaactggaagggcgagcagattatcagcagggactgggtgcaggaggtgtccaccccgaaatttaccttcgagccatctgcagatccctggcatgtaggatatggctatcagttctggatcagtccatatccaggatcctatcgtgctgatggcgcattcggacagattacaacgattctcccagagaagggattggttgtttccatccaatgtccggagcgaggtaatttcgatcaggtgaaacgtgcgctgcatgaacattttctgatggaattgtaagaatagacttgcaacaatatactataatttgcccagaaaccgtacttttggttgaaaagtaaaaatagcagaatataagaataaattacaatggggatgtgatagagggagaggatcagctgggctggtcctttttcagtggagttaaacttgtctgagtaatatgctacaaacaagtttgtggactgaaaaaaccaaaataaaagtgccgaaaatacaagacgcaaaacattaaacaaacgcaataattaaacgcaaaatatcgaattgatttgactttttacgttttactgaggtataatttgcgtaagatgaggaataatattgcgaatgacaggagctgatatatatatgaaaacttgtaaagaaaaggctttagagtggaatgtttctccacgttccgtaaatgatatgtgcaaaaaaggaagaatacagggtgcaataaaagaaaaaggatcttggttaattccagacgactctccaaagccaatggatggaagagtgtctaatggaaaatacatcaagaaaaatatggttgcgaaagcagaagttaaatcattaccaatcggcatctctgactatgttcgtgcgcaggaagaatattactatgttgacaagacgttattaatcaaagaattcttggatcaaaagccattggtatctttgtttacgagaccaaggagattcggaaagacattgaatatggatatgctcagagtgttctttgaaatatcagataagaatactagtaagtattttgccgataaaaatatttggcaatgtggagaagagtatcgttcacatcaaggaaaatatccagtcatattcttaacttttaaggatgttaaatttgatacttgggacgcaacaatagataaaataaggggactacttcaagaagagtatggaagacatcaagagctactaaatagtgataagctctcacaatatgagaaggagtattttacaaagattattagcgctacagctaatgaagtggagcttacttcttcgctagaaagactatctaaaatgcttgcttcacattatgataaggctccagtaatcattattgatgaatatgatactccgattcaagagggatactctaaggatttctacgatgaaattattggattcatgagaaatttcttttcaggagcatttaaggataataagaatttatcctatggtttcctaacaggaattttgcgtattgctcaggaaagtatctttagtggtctaaataatttaacagtgaactccgtaatggatgaagaatacgatagcttttttggatttacagaatctgaagtgaaagcaatgctcagttactatggagtatcagataaagaggaggaacttaaagactggtacgatggatatttgtttggtagcgaagaaatatataatccatggtctgtaatcaactatatttccaagggatgccttcctcaagcatattgggtaaatacaggaaaaaatgaaatccttgatgatgtactaagcgtggctacagatgatattacagaaagattatatgaccttttgcaaggagaaagagtagttgcaagaattgatcaaaatgtggtgtatagatcgcttgcagaggatccagcaaatatttatagcttattgttggttgctggctatttgaaaactcctaaaaaggaactgcaagcagatggttcatatttatgtgaagtatcaattccaaatagagagattgcagctgtatataagagtgaaatcttgtcacatttcttgcaaactggagcaattacaaggactacagcaaataagattgcagaaagtctttatgccaatgattacaagaagttgcagagcgctattggggaatatatggataaatcaattagcttcttcgatggtggagctgaaggattttatcatggtttgatgctaggattaatagcattaatggataatcagtataagattaaatcgaaccgagaatctggagatggcagatttgatgtttctttaattccaagagaaaaaaggtatcctggtattattttggaattaaagtggaaagaaaaattaagcgatgttgagcttgaaaaatggtctaatgaagcattaaagcaaattggtgagttgcgatacgattctgaaatgaaagaggatggaattacggaaatcttgaagtttggaattgctttttcggggaagaaagtatgtgtaagaactgagtagaacaagaatttagtgctaggaggcgatagtatgtttccaacaattaataaaaaagaaacaggtgttaatcttcgaagaattatggatatgagaggagtaaaaccaaaagatattcaagaatatttagggtttggatgtgtgcagagtgtttatcgatggttggatggcgccatacattttgtacgaatggaagaaatcagacgggtaatgctacacataaagatcaacgatatggaagatcttgccgggtagtactgaaaaattaaagggtatgtcggataaggaagttgcagaaattttttaaaagggcagaagcatagcagaagtgagtgggtagtcggttgcgatggctagttacttacttttttatttttataaattttaatacataaaattgattgagaaaatcatgtggtaggttataattttgggattaaggattgataaagtaaaactatccgatgcaaaagcgtggttgattaagctccaggcagatggcaggggatacagtaccattcattcagtccgaggtgtggtaagacctgcatttcaaatggctgtagacgatgatttaattcgaaaaaatccgttcgagtttcaactatgtacagtagttgtaaacgatagtgtaacaagagaagccataaccagaaagcaagagaaaaagttcttggaatttattaagaatgatgagcattacaaacgatactatgacggaatgtttatcctctttaaaaccggacttcgtatttcggagttttgtggattgacactttctgatattgattttgaagagaaactcataagtgtagaccatcagcttcaaagaaccagagatatgcaatatatcattgaggataccaagacaacgagcggaaccagaacgattcctatgacggaagaagtgtatgagtgcttcaaacgcattatagaaaaccggaaaaagccaaagaaggaaccggcgatagatggatataagggatttttgtttttagacaagaaggatatgccggaagtcgcattgcattgggaaaagcattttgaatgggctttagcaaaacataatcggatctataaagaacagttgcccaaaatcacaccgcatgtttgcaggcatacttattgcagtaatatggcaaaaagtggtatgaatccgaaaacgcttcagtatcttatgggacatgctgatatcggtgttacgctaaatacctatacgcatctgggggcagaggatgccagggaagaacttggcaaatttgcaaaaatggcttaaaaatttaaaaacatacatacaactaaaagaaaacctaagtgaaaaagtctttagtaaaatgaaaaaatccagacattttactaagaattttactaaatttggatgacaaaatatacgaacttatgccacgatatgcaacaaaagtgcataaaacactctatcagagcaaatcttaaaaagtggcgtaaaatcaaggaaaatcagtattttcaaggagtttttaaggaatgataaaagtactattcatctgccacggcaacatctgccgtagcaccatggcccaaagcatcttcacccatctggtccacagacagcacctcgatgctgttttcgagatagattcagctgcgaccagccgtgaggaaataggcaatccgccgcactacggcaccaaaaacaaactatacgaggagcatattcctcttattccacaccgcgcgagacagatgacacgcgatgattatttgtactatgaccttctgattggaatggacactgcaaatatcagaaatatgacaaggattgcaggtggcagtgacagtcagcagaagatatttaagatgctgtcatttgctgattacgggacaaatcataagcttacagcagcgcgcgatgttgcagatccatggtatacaggtgattttgatgcgacctttgatgatgtaatcagtggatgccggggcttgttagaatacataaaagaggtgtataatctatagctatagcaattaaaagacaataatagcagcggttacggtgctgaacacagctgcgataattaatttcaggaggcacaaatgcaattacagaatggaagaccgacagataccacaggcagactggataaagaaattcgtacatacgattttttggacaaactgggaatcgaatatcagagaatagaccacgaggcggcatttacgatggaggtttgtgaggagattgacaagacactcggcgcaacaatctgcaagaatctttttctgtgcaaccgccagaaaactgatttttacctgctaatgataccgggagacaagacctttaagacaaaagagctctcgcatcagataggcagtgcgagactttcgtttgcaagtccgcaggatatggaaaaatatctggatatcacaccgggctcagtcagtgtgatgggactgatgaacgaccatgacaatgcggtcagacttctggtggatgaggatgtgctaaaaggtgagtgggttggatgtcatccatgcataaatacctccagcctcaggataaagacaaaggacatgtttggcccggtgataaaggccatgcatcatgatatgacagtggtaaaattaacaggtgaagcatagtaaagcctggcagaacgtaaggagaaccaatggtaaaagcagtattatttgatatggacggaacactcatagatacggagaaatattatcgtattttctggccgatggcacttaagcaattcggctacgacatgacggatgagcaggcgctttcaatgcgaagcctcgggcagccgtatgcaccgcagcatcttaaggatatgtttcatgatccggatatggattataataaaatcagggcatatcggagaaaaatcatggaggagcatctggaaaaggtgggtattgagcttaagcccggtgcaattgagatacttacatatttgaaggaaaaaggcattcacagagcgatttccacagcgaatgatatagaaagagctgagaaatatcttaaaaagatagggctctacggatattttgacaagatcatctgtgcgcctatggtggagcatggaaagccggcacctgatgtgtatgagtttgcatgcagcgagcttaagctggcacctgaggagtgcatggcggttgaggattcgccaaatggtgtcaaaagtgcatattctgcaggctgtaaggttgtcatggtgccggatttgacacagcctgatgaggagctgaaaaagatgctttttgcctgtgttgacaggatagatgagattaaaactatagtataatcacagcatatataagtcgtggaggcatgatgggcacagaaaatgatttaccgggaatttcattaaaagacgagcagagacagcttcaaaatatcatagggattgcacaggataatctggaccgtgcaaaggaatcggtaaaaaagctgacagatgatttagaggatttaagagatgtttacgaggcgcaggacaaggagggacttgccctgtggaacaatgcgacagcgcagcttcatgagaacgagagaaatatcgtaagatgtgaaaaggcgcggaaaaagccgtattttggcagaatagattttaaggttccgcgtcagaagtcacaggagtcctactatataggtagagtcggtattgcgaagaaggcatcagagcctgtggtcattgactggagagcaccgattgcatccgtatattatgagagcagtcttggaccatgtaagtacacggtgagctcagagggtacttttgagattgatttaaacagaaagcgcacctatgagattgcagatgataagcttatcgacttttttgattcagatgtcgtagcaaatgatgagcttctgacaaagtatctggctaagaataaaaaggcagtgctcggagagattatcgcgacaatccaaaaggagcaaaaccttattatccgccgttcgccaaagacgaatatcattgtgcagggagttgcaggctcaggaaagacaacggttgcaatgcacaggatatcgtacattttatataattatgctgatgatttcagaccggaggatttctacattataggcagtaaccacattttgttgaactatattacaagcgtgcttccggagcttgatgtgtacggcataaaacagatgactatggagcagctttttacaaggcttttgtacgaggattgggatgacaaaaagtacagcatacatgaagtcagcaaaaatgacagtagaaacagcataaagggcagtaaagaatggtttgaagctcttgaaaaattctgtttagattacgaggaaaagtgtattccaagagatgaggtctacatggaaaaaacaggcaatctgcttgtgggaaaggtgctgatagacacttatctgcatgataatccgcttctttccatgcagagtaaaatcctcatgttaaatgagataatttactcgaagtatgaaaatgaggttctcggtaaggaagtgaagttccctgcaaaggagcgcagcaagcttgataaaaaatacaaaacctatttcggtaaggatgactggaaaggctctgtgtatgatttttacagggattttctgcttagtcagaaggaatatgatatagatattccaaaggactcatttgatgtgtatgatctggcagcgcttgcgtatatttataagcgcatcaaggagacagatccggttcgtgaggcgagtcatgtggttattgatgaggcacaggattttggcatgatggcatactgctgtttgcattactgcctcagaaactgcacatacactatcatgggcgatacctcgcagaatatacattttgagtatggcttaaatgactgggaggacttgaaaaagctgatactcacaggcacatatgacgcattcggtctgcttcgaaagagctacagaaacactgttgagatttcagaatttgcaacagagatactgcgccatggagattttgcaatttatccggtggagcctattatcaggcatggaaacgcagtgcgcatagaggagtatgccaatgtgcgctcactgatttcggcatcggttgacacgataaaaggctggcagagtgaaggctatgagacgatagctgtcgtgtgccgtgatgaggcagaggctctcaaggtgtctgctgagcttaaaaaacatatagaaatagcagatgatgatattgaaactgcacagtttggtgcaggagtcatggtacttccggtcgcgtatacaaagggacttgagtttgatgctgtattgctgtttgacccatcagagagaaaatatccggctgatgatagtcatgtgaagcttttgtacgttgcggctacccgtgcacttcatgagcttgctgtattccaccggggcaggctgacaccgcttattgcagaccctgctccttccaacaggcatcagaaggagttttctgcagagccgcttactaaggcaaaggaatatgaaaagcagcaactgacagaaaaagagatagaagagcaaaagcgtgttgatggcagacgcgatatggatgaaagagagtattttggtccgtcgcgcattgcattaaagcctgagcagttgacaaataaggctgaaaatgagaagcttgatttatctgcatttgtaaaaaaagacagggaaaatcaaacacaatgtactgctacagatatggcaaataaaattaagattaaggaagtaagtaaggctgcaaaaaagagttgcctccctctaaatccctccccatacgcatacggctcaatcccggacaacgatatacttcatgtaaagggacattcaaagggcaagtttgcggtaaaatggctcaaaaaaggtaaatcgcatgttgaaatcgccacagcggacggcacactttatgtgataccaataacaccggagatagtacgcgtaatctttgtaaaaggaatcggagtgaagccgcacaaaacctattggaagcaaaaggccgatacagccttcaaatgggtggcaaaggaatccaaatcgcttattgaaattcaaacggagaagctgatactaaggatagaaaagaaaaacggagccatacagtattttgatgccgacagaaatctccttgtaagtgaaaatgccacagagccaaggcttttaaataatggcgagtgctacacattttttgactgggataaatcggaaaagctcaaatccaagggaatacttgcgacagaccttactgatttgacaaacaaagccagatatatttcgttcggaggcagacagcagaggctgccgcttgtcgtgtcaaacaagggatatggaatcgctactgcatcaagccgcacagcactcttttgcaatataaagatgtacggacagtatatctttgtagacggtgacactcaaagcgactattattttataggtgcaggcagtgtaggccatacacttgagctgtacggcacattataaaatgcaagttgcccaaagcaaaattatctgataaaatatcggcatgagtatatacggaggataacagatgaaattcaggacagaaaacgagtttacacatttcaaattttcggatgtgcatgtgagcgatatcatgatgagctttggcaccttcaaaatatgccttgacaacgtaatcataaaggcagataattctaaaaacagagatatccgtgatatgaggacaaacggccttatattaaagctttcagatgcaaatattatttcattcatacgcgagggctttaagacatatgatgccgatggcaacctaaagagcaccacggctgacgaggagatagaggagacagattatctcgacaccttcaacaattttcttgacggatacgcatatttaatcgagaaggagaatgaaaattataccttcgtattcgatggaacagatgagcgctcgtacaccttgattgtatcggcatcaaaggacgagtgcgagtgggacagatttatgaatattgaggcatagagtatgccatggtgcatttttagacaagtccaagatgcaccatggcatttttaagcccatcttctttgatatcgtctgtcactatatcggctacagccttgacttcatcgctggaattgcccatggcaacaccgacatcacagtagcgcagcatatcaaaatcattctgaccatcgccaaagcctattgtatcagcctgactcatgtgaagaaactctaccacatcacgtatgccggttgccttgttgacaccgcgcaatgtaatctcaccgctgtaaggttcaggctctttaaagctgctcagggttactacaaattcatcgctgaggagctttcttaaatcatcaatgtggtagttgcaattgcagtagatggtgctttcaacatcggcgtatcgattagaaaagcttgataattcatcatcaatcacgatatccttaaatgtcgggttgtcctgtatcacatgcatgtcaaactgctttgagaatgctgatatgaatttgtcggcccacttgtggttggtgatgcttttatcctttgtctggaagataagtcctgtgtcgttgtcaccaacagtgtcaagaaccttctgtaacagattctgcccatagacatgatgtgcaattaccttatcacccacagtgacatagccgccggcagcagccaccacgccgtcaaaatcaaaggcttttaatgatggataaatctgattgtaactacgtcctgtgcaaagaaaaatcatgtgaccgttttgttttgcgtttattagagcatcagcggttgatgggctcatggtgctcttgccgaaatcaacgagagtgccgtctatatcaaaaaataatagttttttcataagtgttacctgccttattattattaattcatataccagatatactctacaatacgaattcaataaaggcaatagggaatagcctaaatttatttaataattgttgcaaaagaaggctctgttataaccacaattaagaaaaactataatatattcctatactttattttcttaagttttgactatgatgggttgaaataataagtttattgtgttataacgttaaacaacaaaaaaacaataaatgcgttgaaggagacttggatcaccagacaccgacaggaatacagcgtcaccgactgagagcgctgtttggaagagctgattgcaggaacactaccggagcagatctgttgaacgattgatatggtttattgcatagataggtttattgtatgtgaattaaactttttatatatcaaaagtaggcagatacgattcatccacgttacggataagagtggagaaacaggaacagtcctttttctcaaagcgggtggtaccgcggaatatttttagaattttcgccccggagcatttcattaatttgatatgctccggggctttttggcgtatatagcccagtttcgacagaggcacatagcaattcgtgggctatatacaatactacataaatttatattccgtcccgcttaaaaaatcaaaggagcacaaaaatatggaattcttaacaggagcagttcaaaaggaagacctcggtatcgcagaaattcttgcaggcgactacgagggcaaaaacatcaaagtaaagggtgcaatccacaccataagagatatgggtgaggttgcattcatcgtcttaagacgcagggacggactcgtacagtgtgtatacgagcctggcaaatcccagtttagcgtcgatgatctaaaggaagcagataccgtggaggtatgcggcacatacaagagtgatgaccgttctccaaacggcttcgagcttcgtcttgacactatcacaattttatctgagccggcggagcctatgccgcttcagatcaacaaatggaaactgaatacttcgcttgaggcaaagctcaataacagggcagtggcactcagaaatccaagagagcgtgctacgttccgtatacaggagggtatcacaaggggctttagggatttcctttataataatggatttacagagattcatacgccaaagcttggtgcaaaatcagccgagggaggagccaacctcttcaagcttgaatatttccacagaccggctatattacagcagagcccgcagttttacaagcagatgatggtaggtgtctttgacagggtatttgagactgcacctgttttcagagcagaaaagcacaatacaaagagacatctgaatgagtatacatcactcgatttcgagatgggctacattgacggcttcgaggatatcatggagatggagaccggctttttgcagtacaccatggagcttttaaagacctcatacgccaaggagcttgagcttttaaagattaagctgcctgatgtggcaagcataccaagagtcagatttgacgaggcaaagcagcgtgtcgcagaaaaatataacagacagttcagaaacccattcgacttagagccggaggaggaggtacttatcggacagtacttcaaggaagagtatggcagtgattttgtatttgtcacacattatccttcaaagaagagaccgttttatgccatggatgatccggcagacgagacatacaccttaagctttgacctgcttttcagaggtcttgaaatcacaacaggcggccagcgaatccatgactacaacaagcttatggaaaaaatcgcaaagcgtggcatggagacagagggtatggagagctatcttttagcctttaagcacggcatgccgccacatggaggtcttggaataggacttgagagacttacaatgcagcttatcggagaggacaatgtgcgtgaggcaacactgtttcctcgtgatctcagcagattggagccataggtcacagcttctgggggtgttgcatgtgtgtatatattttgctcagaaaatttttaagcttgttccgacatttcctgcggataggttattggcaggatgtgtgctgtgaggtattacaggctgtgagcgtcggaactgttaaaaatttgtctttgcaatatatatgcacccatgcgttgcagggtgttgatgcgcaccctgggcagatattggcacatttccataaaaataaaatatcaggaaagagagaaaggatatcgtatgaatcatataggaacaagagaaatcgccacagagcggcttactcttcgaagatttgaaatagaagatgccgagaacatgttttacaactgggcgaatgacccggaagtgacaaaatatcttacatggccggcgcatgagagtgttgatactacagagactattttaaaagaatggatatctaagtatgacgaaaaagatttttatcagtgggctattgagcttaatgatctcgagcagcctatcggaactataagtgcaattaaaaccgatgagagagttgagtcggttgaaatcggttattgtatcggaaagcgtttctggaataacggttatatgacagaggcactcacagctatcatcagatttttcattaatgaggttggtgccggacgtgtatgggccagacatgatactgaaaatccaaattcaggcaaggtgatggctgcggcaggcatggattatgagggtactttacgccatgcaggcttcaacaatcagggtatatgcgatgaagcggtatatgcaaaggtcagaagtgcagcacttgacgaggagcctgaggatgagactcctgagcagcaggctgttaccacaaaggtgatgggcgaggacggagtcatgagaaacgtaatctctgatgagactatggagtatgtcggaatccttgcaaagcttgagctttcaccggaggaggcagaggctgccaagaaggatatggcagatatgcttgattatatcgacaagcttgaggagcttgatacttcgggaattgaacctatgagccacgtattccctgtaaacaatgtattcagagatgatgttgtcacaaacggtgacggaagtgaagctacacttgccaatgcaccggtcaagaaggacggcggattcaaggtaccaaagacaatcggcgaataacggcaaggaggagaaaaatggatttaatgtctttaactgccgtggaactcggcaagaaaatacaggcaaaggaagttacagtggaagaggctgtaaaggctgccattgcttctataaaagcaaaagaagaaaagataaacagctttgtcacaatagacgaagagggtgcacttaaaaaagcagcagaggttcaggcaaaaattgatgcgggagagctaaaaggagcgcttgcgggtgtgcctgtagctataaaggataacatgtgtacagaagggcttctcaccacatgttcatcaaagatactctacaatttcatcccgacctacacagcggaggctgttaagcgccttgaggatgcaggctgtgtcatcgttggaaaaaccaacatggatgagtttgccatgggaagcacaacagagacatctgcctttggagcaaccaaaaacccatggaatacagagcacgtaccgggcggttcatcaggcggaagctgtgcagcagttgcagcagaggaggtaccgtttgcactcggttcagatacaggcggatcaatcagacagccaagctccttctgtggtgtgacaggaatcaagccaacctacggcacagtttcacgatatggactcattgcctatggctcatcgcttgaccagattggacctatcgcaaaggatgtcacagactgtgctactatacttgaggcaatcgcttcatatgatacgaaggattcgacatcagtaaacagagacgatttgaagtttacagaggctcttgtcgatgacgtaaagggtatgaagatcggtattccaaaggattatctcggagatggacttgacccggaggtgaaatcggcaatccttgcagcggcagatgaattaaagaaaaaaggtgctgttgtggaagaatttgacctcggacttgtagagtatgccatcccggcttactatgtaatcgcctgtgctgaggcaagctcaaaccttgccagattcgacggtgtcaaatacggataccgtacaaaggagtacacagaccttcacaacatgtacaagaaatcgcgttctgagggctttggacctgaggtgaagagaagaatcatgctcggctccttcgtgctttcatcaggatattatgatgcatattacttaaaggccttaagagtaaaagcacttatcaaaaaagcctttgatgatgcctttgccaaatatgatgtgatactcggaccggcagcaccaaccacagctccaaagcttggagagagcttaagtgatccaatccagatgtacctcggtgatatctacaccatatctgtaaaccttgcaggtcttccgggaatatcgcttccgtgcggcatggacaaaaacggacttccgatcggattacagctcatcggagactgctttaaggagaagaatatcatccgcgcagcatacagctttgaaaaaacaagagagcttaagcgcagcattatcgcggaggaatacagtaacaaaaatacagcagataccaataaatctgccggtgcacagtaggaaggaggcaaaaaggatatgaaaaactatgagacagtcatcggacttgaggtccatgtagagttagctacaaaaacaaagatcttttgcgcctgctccacagcattcggaggcgcaccaaacacacatacatgtcctgtctgcacaggacagccgggctcacttccggttttaaacaagcaggttgtagagtacgcagtggcagtaggacttgccaccaactgtaccatcacacagtacagcaaatttgacagaaagaactatttttaccctgataacccacagaactatcagatatcacagctttatctgccaatctgccgcaatggttcagtggagattgagacagcaaacggaaagaaaaacgtcagaatccatgaaatccacatggaggaggatgccggaaagctcgtacatgacgagtgggaggacgtatctatcgtagattacaaccgttccggagtacctcttatagagatagtatcagagcctgatatgcgctccgctgaggaggttatcgcataccttgagactctgcgtcagaccatccagtatctcggagcatctgactgtaaattgaatgagggctcaatgcgtgccgatgtcaacatctcagtcagagaggtgggcgcaaagaagtttggtacacgtacggagatgaaaaaccttaactccttcaaggctattgcacatgccatcgagggcgagcgtgagcgtcagatagagcttcttgagatgggcagaaaggtagtacaggagacccgtagatgggatgacaacaaggaatcatcacatgccatgcgttcaaaagaggatgcacaggactacagatatttccctgagcctgacctcgtgccaatcgtcgtatccgatgaatggattgcacagataaaggcaaagcaacctgagcttcgtccacagaagcttgcacgctacaagaaggaatacgacatccctgagtatgatgcaaagattctcacagagtcaaagcatatggcagacatatttgaggctgccacaaagctctgcggcaagccgaagaaggtttcaaactggctgatggttgagacaatgcgactgttaaaggataatgagatggatgcagatgagataaaattctcacctgtaaaccttgcaaagcttgtagatctggtagatgcaggcacaatcaactcatctgttgcaaaggaagtatttgagaaaatattctcggatgatatcgatcctgagcagtatgtcgaggagaacggtcttaagagcatgaatgatgagggtgagcttaaagccacaatccaggctgtcatcgatgcaaatccacaggctgtggaggattatcacaatggcaagaagaaagccatcggagcactcgtaggtcagactatgaaggctacaaagggcaaggcaaatcctgctgttgtcaataagcttcttatggagctgttataattggatagatattaagaaaatggatccggcaggtcttttgatctgtcggtcctttttttcaaaagcgcctcagcttgcttgcacgcatttattcagtagtgtataatagttaaatggctgataaagcagccaaatgatacaaaggcggtaatttacctatgaataatgatgatttcaaggaagtacctgacaatattcaggataataaggaagaaactacaaataacatagataatacaaacgataacaagtcaaacgactacgaggatgtctgctatatctgccgcagaccggagagcgtggcaggaaagatgatacatatccagccgaacctgtgcatctgcaacgattgtatgcaaaagacctttgactccatgagcaacggtaattttggcaacctcggaaatctgggaaatataagcaatatggattttggcaatatgcccaatatcagcatgataaatttgtcagatctgacaggaggcataccaaacagccagaagcttaagaagaaaaaaccaaaggaagagaaaaaggtcgagccgattcttgatattcactcaattcctgcaccgcataggatcaaggcgagtcttgatgattatgtggtaggtcaggagcatgcaaagaaggtcatgtcggttgcagtatataaccactacaagcgtgtcatggctgacaataagcataaggcgcaggaagagaatacaactgcaaagcaggcttcaaataaatatgatggtgtggagattgagaaatcaaatatgctcatgatcggacctacaggttcaggaaagacatatctcgtaaagactcttgcaaagcttttagatgtgccacttgccataacagatgccacatcacttactgaggccggatatatcggtgacgatatcgaaagtgtggtaagtaagcttcttgcggctgcagataatgacgtggagagagctgagcacggtatcatttttatagatgagatagacaagcttgcaaagaagagaaatgccaaccagcgtgatgtgagcggagagtcagtgcagcagggtatgcttaagcttttagagggctcagaggttgaggtgccggttggtgccagcagcaagaatgccatggttccgatgactacagttgacacgagaaatattctctttatatgcggaggcgctttcccgggacttgaggatatcataaaggagcgtctgaacaaggaggcttctataggcttcaaggctgatttaaaggacaagtatgatggtgatgagaacctgctcatgcaggcaactgttgatgatatccgcaaattcggaatgattcctgagtttataggacgacttcctatcatgttctcacttgaggcgctcaccgaggatatgcttgtaaagatattgaaggagccaaagaatgccataatcaagcagtatcagaagcttcttgagatggatgaggtaaggcttgagttcgacgatgatgcactctatgccatcgccaagatggcaaaggagaagaaggtcggagctagagctcttcgtgcgattatagaggatttcatgctcgatatcatgtatgagataccaaaggatgacaatatcggcacggttacaatcactaaggactatgtggagaagaagggtggcccgctcattcagatgagaggtacacctgagcttgcagacagtcagcacgtttaattgttaaatgattatgaaattgtgaattggctgtaaatgatgcaaccaggctatgcgtaatgaatctatgtgtagtctgtaatgatttataaacgttcatatatcaagaggaattggaaaaatgaaaattatccactgtgcagacctgcatctggattcgaagatgacctcgaatctgtcaaaggagcaggcaaaagagagaaaaatggaaatactgcgtacatattcaaggatgatagagtacgccaaaaataacgatgtaaaggcgattatcatagcaggcgatttatttgacacgagaaatgtgtcagcgactgccagaaatctggtaaaggattcgattacgtcaaatccggatattgatttctattatcttaagggtaatcacgactcggacaatttcatatcgaagctcgatgaaatccctgacaaccttaagcttttttctaatcagtggacctcatacagctatggaaatatcacaataacaggtcttgagatagataagtctaaccaggctgccatgtacaattctcttgtgctcgacaatgacaattacaacgttgtcactctccacggacagctcggtgatgagatttccacaggcgaccttaagaataagggcattgattatctcgcgctcggtcatgtgcatgagtatcagagcggacagcttgacaaccgtggcatgtactgctacagcggctgcttagagggaagaggctttgatgagtgcggacaaaagggctttgtggtgcttgatatagatgatgagaagctcacggcaggctttagctttgtaccgtttgcttacaggagtctctacacgttgtatgtggatgtgacaggagccatgaccacacaggatgtggctgtgaagatggaaaaagccatttcggacagtgaatattcatcgagaagcatggtaaagttcgtgcttgtaggtgaggtggacgtggattgtgagataaacacagacttcctcaaggatatgttcgaggaatatttctactatgaaaaggtgtatgatgagacaagacttctcatcaattacagtgaatacgaaaaggatgcatcgcttaagggtgagttcatacggatggtgcttggctcagatatgaccgaggagcagaagtctgaggtcatcaggtgtggtatatcggcgcttagcggggaggagatttagaaattgaaattaatagcttgtcacataaacaacttcggaaagctgtccgatcttaatatcaatttcaatgatggagtcaatgtcataaaccagccaaacggctggggaaagagtacacttgcggcttttttgaaggctatgctgtacggctttgatacgaaaaaggagccgggcgcctttgagagggaaagaaagctctataagccatggcagggcggcacttatggtggagagcttgattttgaggccgatggagtggagtacagacttgtaaggacatttggacttacagaaaagcaggatgattttcacttgtacaggcttgcaaccatggttgagtgtgatgatttttcaccactgcttggagaggagctttttgacctcgaccgcagctcgttcaagagaacgatatacatagcgcaggcagactgcatgttttcgtcctcagacagcatcagcgcaaagcttggcaatatggcggaaaatacaaatgacatcaacaacttcgagtcggcgacagcggacattaaggacatgatgaacaagatgtccccaaaccgtatcacaggctctatcaaaaagcgtgtaaatacactcacagccttggaacaggagcttaagaagtatcaggcagcggatgaggcggcagcacagctttcacagaaaatagatgagaaaactgcccagaagaaggagcttaccggtatcagagctgagtacggcagggcgcttcaggtggcatctgaggacagcagaaagcaggcacttcgtgaaaattacgagcagctttgtgccgttgcaaaggagaaagagagcatttacaatgctgcatcggcagtctttggagacaaagcaccggatgaggcagagcttttggaaaagacaaagcaggccggagagctagaaagcttaaaggctgtagaagataatctgagctttacgcctgaggaggagcagtatttagatacactttcaggtatgtttaaggatggtgtgccatctgatgatggtcttgatgagatgcaaaagaagattgcaaacatccagagcgtcaagaatgagtacagccatatggagctcaagctctcgcagatgacctcacttgcaaagatggcagatgatgaggaggagccggagacccctgagaagactaagcttgtacctgtaggtattgtgcttatggttatcggtcttttggcagcggctgttgccacggtattcagtctgaatgagaagtacaatttgaaggaaattatgtttcttgtggtaggcatagctggagtcgctatggcgctttgcggtgttgtcatgatggtctatggaatccgtatgaacaacaaaaagcagagagcatacatcaggcttatggctgagcgtgaggaaaatataaagcagaaggagataccgattcaggaattaaaggagcagcttgagcagattcaaagcggcattacatcaatggagcatgaggtatcgcagttttttgacagcttttcgattgaagcagatgaatcgcagtatcaggagaagctttatgagcttcgcacaaaggctcatgactacagtcgtttcaacgagcagataggaaagcgcgccaagacaaaggctgactatgagaaggcaaaggcttcgcttgatgagtatttaagtctctatggatatgacagtgctgcagaatatacacaggcactttcacagatgaaaaagcagctcgcagaggccggctttgcaaaggaaaatatggacagtgcgcttcagaagaaagcgcagtttgagaatgacaatgatatggacaagcttcttgcaccaaatgagtgtccgtatacacttgatgagctcaatgagatgatttcaaaggtggagggcagcctcgatgaaatcagggcatccttagtgcagtacggcagacagatggatgatctgcaggagcagcttgatatgagggatgaaaaggagcaggagtatcgcaactgcaagcagatacaggctgaggaaaagcataagtacgagatacttgggcttacatcagactatctgaccagggcaagggagcagtttactgccagatacatggcgcctatttccaatggcttccagaagtacttcggtatcctgacagaaaatacagacagaaactggcaggtggatgccaatatttcaataaggatgaaggagcaggggcagcttcgcgatgtgagaaccatgtcggcaggctacaaggacctgataggcatatgtatgcgttttgcgcttgtggatgcgatgtatccgggcgagaagccgttcctcatacttgacgatccgtttgtgaatctggatgatgagaagcttgctcgaggcagaaggctgcttgcggtgctttcgcaggattaccaggtgatttattttacatgtcatggaagccgcgagtaaattttggtcgaagctttgtttatattagataaatatggtagcatatttttatttatagaatataattatatgagggtcaaaatatcttttgaccctcatatctaaatattatatcatatgaggtaaaatatgcagttcatagtatcaaaaaaggagttcattccaccggtaatagctcctgatatcatagagacattgggcgatgattacgagatatggacatatgaggattacgaaagactcccaccacttctggtgggagtttattcgtattcggctattccaaagtgtcttgctcctttatcaacgcagggacttgtgaagagcggtgtgttcaggcttcaaagggagtttgttccgggactatacggaaatggtgtgtatgtggtggttattgacacaggtgtgaattatgcgcaggaggcttttatgacacctgagggtaagactaagattgcagtgctctgggatcagaatacggatacggtttattctgaggatgagataaatgctgctattttatcggaaaatccatatgagagcataccgggcgatgaggatgggcatggtacgtttgtggcgagcgtgatatgtggcaatgacagaccgcaggatgattttgcaggtgtggcaccacaggctaagcttattgtcgtgaagctgaaaagggcacctcaaaagctgtatgatttctactttattccggatcgtaaaatagtgtactcggaggttgatgtgatgagagcagtgcattttgcagatgagtttgcaggtcaaaagggagcaccggctgtcttttgcatggcgcttggctgcaataacggaagccacacgggagcggaggatctttcagagtatctggactatatcacggcaaaaagaggcagggccgtggttgcggcagcgggcaatgaggcgaacagcaggcgtcattataaagggcgcataacagatacagtcgatgatattgagataaatgttgagcaggatatggatgggttttatctggaatgctgggcactttcacctgagctatttacgctttctgtcatatcaccgagtggtcagtcgaatccggcaggggtaccaatgcgaatagacagcggtgaatactcatttctgcttgaaggaacacaggtgactattgactacaggcagaccggcagacagacgagggatttgcttatatttatccgctttgaaaaggtggtgaagggagtgtggaccatcagggtatttccacttagtactattggaggtgtttttaatatgtggctcccgatgacaggacttcttgatgctgatgtgagctttattgtctcggagcctgataccacgctgaccatgccttcggatgctaagcttgtgataacggcgggaggctataattccctaaatgatgcaatacttttagagtcgggaaggggctttgacgcagacggtggaataaagccggatctcgtagcaccggctgtggatatcacaggggcaaatctaagaggaatgtatatagcactaagtggcacatcggcggctgctgcaatcactgcagcggtggcggctctcatcatggagtggatgatagtgagaggcaatgttttgctcgcaaacggagtggatataaaaaatgtcatggtaagaaactgccgcagaaaagaaaaaaccgactatccaaataaaatttttggctacggattcatgaatgggtttgccaatttctaagaaaacggatataatatattctaaaagataaaaaggaagggtgaatggatgacaaaaagcaataatttattagcggattacgctgcaaaaaaacaggatatctgtattaaaaatgacacaatttcagatagtcttttcagggaatatggtgtcaacagaggacttagggatgtaaacggaaagggagttctgacaggtcttacgaatatttcggagattgtttcatttaagacgggcgaggatggcagcagcgtgccatgtgacggacaattgtggtacagaggctacaatgtaaagacacttacaaataacttaaggcccggagagtttggttttgaaaaaattgcttatctgctgcttttcgggcagctgccatctgagagtgaattggctgagtttacagaggttttaggaagaagcagaacccttcctaccaattttacgagggatgtcatcatgaaggctccgtcaaaggatatcatgaattccatgacgagaagtatactgacactggcttcatatgatcctcttgtagcaaaggcgggcatcgacaacaatatcagacagtgcttatcacttgttgcaatattcccgatgcttgcagtttacggttatcatgcgtataatcattatgaaaatgatcagagcatgtatattcacaggccggatccaaagctttcgacagctgaaaacttccttaggatgctcagagctgacaatcaatatacagagcttgaagcaagggtgcttgatatggcacttattcttcatatggagcacggcggtggaaacaactctacatttaccacccgtgtggttacatcggcaggtacagatacatactctgctatcgcggcagccatgtcatcccttaagggaccaaagcacggcggtgccaatatcaaggtgatggagatgatgcgggacatccgttcgcatgtgaagcactgggatgatgaggatgaggtgagagcatacctcagaaaaatgatggatggtgaggtgtttgaccacaagggactcatctatggaatgggacatgcggtgtattcactttctgacccgagggagcgtatattcagaggctatgtggagaagctttcagttgcaaagaagagagataatgagatgaatctctataatacaatagagaaggtggctcctgagattatcgctgaaaagcgccatatctttaagggtgtttctccgaatgtcgatttctacagcggctttgtttatgagatgcttggtattcctatggagctttacacacctctttttgccattgcgcgaatcgttggctggagtgcccacaggcttgaggagattgtcggcatgaacaagattatccgtccggcttacaagagcgtcatgaaagagatagagtaacgagagaatgttacagtctatcgttcatatatcaataatacgatatgttggggattggacatattaaaagaatcgaggtattatacaaatgagttttacaaaggtaaaaaagggcgtctgtgcagcaaagggctttgttgcaaacggattaaactgtggattaaacagtgacaaaaacaaaaatgacctggctttagtttattcagaaacacagtgtcaggcagcggctgtttacacaacaaacaaggtgaagggcgctcctattcaggtgacaaaggcacaccttgaggcatcaggacatacggcaaaggctgttattgccaacagcaaaaacgccaacacctgcaatgctgacggagtagagaaggctcagagaatgtgcgagcttgcagcagcagagctttcgattgatccaaacgaggttatcgtggcatctacaggagttattggccaggtgcttcctattgagcctatcgagagccatataaaggagcttgcaaagggactttcggcagacggcaacgacaaggctgtaaacgctatcatgactacagataccgttccaaagcagtatgcggtaaagttcatgcttggagactgtgagtgtacagtaggcggtatggcaaagggaagcggcatgattcacccgaatatggctactaccttaaactttatcacatcagatgttgccatctcatcggagctcatccagaaggccctgagcgagattgtaaaggttacctacaactgcttaagcattgacggcgatacctctaccaatgatatggtaagcatcatggcaaacggtcttgcaggaaacacacctattactactgagaatgatgattatcagacctttaaggatgcactgtacgaggtgctttcaaatcttacaagaatgcttgcaaaggatggagagggtgcttcaaagcttttagagtgcacatgcgcaggtgcgcctgatcttgatacagcaattattgtggcaaagagcgttatccgttcaccacttttaaagtgtgctatgtttggcgaggatgccaactggggacgaatcctttgtgctataggctatgcggaggctgattttgatatagacaaggtggagcttcacctgcgctcaacagcaggaagcatcaaggtgtgcgagaacggtgccggagttgacttctcagaggaggaggcagcaaagatactgcatgaggacgagatttacatcgacatagatttacaccagggagatgtgtcagccaaggcatggggctgtgatcttacatatgattatgtaaaaattaacggagattacagatcttaatcttgacaagtaatattgattaatgatattatttttttaaagtaattaattaaaaaagtaaagcgaacgagggcgttcagatattaggttatctgcgccctcttttttgttggaaaaatcacatttacaaaagagaggttaggaggcggtacattgactaagaatgcattggatatgattgatgagaaaatagtagagctgctgcaggaaaatgcacgtatagcgataaaggagatagcggcacaggtgtttttgtcatcaccggctgtaacagccagaatagagagattggagagcaagggaatcataaagggctatcatgccactgttgattcggttaatctgggctataagataaaggcttttgttaatctggatctggagcctgtacaaaaggaagagttttatccgtttattgagagtgtggagaatgtcatagagtgcaattgtgtgacaggagagtattctatgctcatagaggtggagtttttagatacggaggatcttgatgactttatcaacactctgcagaaattcggcaagacaagtacacagatagttttttccactcctgttgagcacagaggcctgcctgtacattcaggttttgatgcataagatgatatgagagtcaaaagatattttgcatgattgattgaagtgtgctaaaatagtttgcaaaaatactgactgttaaacatgattgtggatgctttgaatagtcagatatattgattacggcaggaggataatatgagtaagaaattaggcttcataggttgtggaaacatgggaaaggcaatgatacacggagtgatggcatcaggcgaggcacaggcaagcgatattcttgcatctgcaaagaccgaaagctccagagaaaagaatgcagcagagcttggaatcaggctgacagcggacaataagagcgtagcagagtttgcagatattctgtttttagcagtaaagccacagtactatgaggaggttatagcagagataaaggacgctgttagtgacgatgaaatcattgtttcgattgcaccgggcaagtcactttcgtggtttgacgagatgtttggaaagagcttaaaggttatacgtaccatgccaaatacacctgccatggttggtgagggcatgatgggagtctgtgcaaatgaaagagtatcgcaggcggagcttgatacagtgcttgatttgtgctcgggcttttcaaaggctgagatgatagacgagaagctcatggatgtagtgacagcagtcagcggaagctcaccggcatatgtgtttatgtttatcgaggccatggcagatgcggctgtagcaggcggcatgccaaggagccaggcatatacgtttgcagcccaggcagtgcttggaagcgcaaaaatggtgctcgagacaggaaagcatccgggcgagctcaaggatatggtatgctcaccggcaggaaccactatccaggctgtacgcgtgcttgaggaaaagggcatgagaagcagtgtttttgaagctatgatgaaatgccttgatatctcccgcaaaatgtagtagaattattgcattgagttaaaggagaaaagcaatgagtcaggcaaaggttgataaatataagaatgaaaaggcaaatcgtaaaaagacaaatgccagaaataaagtaaagcgtgttatagcacgaattgttgcagctgcggctgtagtcgcattggtaggctggggcggttactccggatatcagtactatgagaagagtcgtccggtgaactgctattacgcggatatcagtgctgtcagcgattatctacagggattgtctgcagacagtgagcagtagattatatttttgatacataacatatattttacgatttatatgattaagttaaaatacctcgcaggttactgcgaggtattttcagtttttgaagaatccccgggctctttttgggattcagatacagtctttgcattttcttcggtatttgaggtgtcagatttttttgctttggagagtgtgttatcaattgcgttgagcagcactttggaggtgtactgacttgtgtttgcgtaggaaatattatcggtggattgattttgcacaatctgcgatacgagctcgttcatcgcaggctcaacaagcggatacatggtttccaccgaatcagtcatgttttcaaggcttatggagttaatattattgctgtccaccgccacagacacatcgatagccgccccacccagcgctacagatgtgttgtacacacccggtgtatacatgccggtttcttccaccttgggctttggttcatcacctgaaaaataatatgtagcagcgaaaattatcagaagaagcagtatgccaaggagcactccggtcagaatgacatgcttcatttttacaacaacgatttttgtttttgcactcatatgcgcctcctgtggttgttttatatataatatgtgtggggacgcgcaaatatgacagatattcctgactataacgaaaaagagatatccatgaaggatatctcttttatgttataagagcgatagacggggctcgaacccgcggtctcgaccttggcaaggtcgcgcgttaccaactacgccactatcgcatttgttatgtttgtgtgctctcttgtgtcgagcacgtgttatataatacacgatagtggagcatctgtcaacagttattttaaatttttttaaaaaagtttgacgataccagataaaacggttgtattgataaattgttctgcaccgcgggtgagaggttccgttgcactcctataacgaaaaagagatatccatgaaagatatctctttataaagagcgatagacggggctcgaacccgcggtctcgaccttggcaaggtcgcgcgttaccaactacgccactatcgcatgtattaagttgtgtgccctcttatgcttggcacgtgttatataatacacgatagtggtgtatctgtcaaccattatttttaattttttgtaataagtttttcaatcttgtccatatattattttgtgaagatatgaatttcgcggttattttcattggcataattatgctataattatgtcaatgaaaggagtgaagtatcatgccacttattatgcctattaaggatttacgcaatacaaccgagatttccaatattgcacataaggaacaggagcctatttttatcaccaaaaacggatatagcgacttggttgtaatgagcagtgaactgtatgataaatttgcaagaatgaatcgcatcgaccaagcaatcttcgaatccgagcaggaaatcgctaacggagcagaagccgttgatgcagaaatagtttttgcagaattggagaaaaaacattttggataaattgtttcctgaaaatgccaaaggacaagatgcccgaattaaaaaagccattttaagcttagatacctttcatcaatcccaccaagagcgaaacgaaggcagatatgccggaaaaggctaccgacagttaataattgataactacatggctatttttcgcattgatgaaccacgcaaaatcgtttatgtagtaacaatacagtatcagggacggaatctataaagaaagcaccaaaatactgaggagaatatcaaggggattctcgattattgtgtccatgcaggcataaaaggcatcatctgctttagcatgggggatagggggataccatgcgtgagggcgatagagagtattttttatcatgccttggacaaatactttccgggaatgaagaataagtatattcgtacctatggtaatgcatatgactgtcacggtcctaataatgaaagactgttagatttgtgggatttttaacaagacacagccgatagaatctgattttgataagatagtaaaaggattggcaaagaaaaaaataattacttttccggattatgtgattatgatacaattatggaaaatagtgttttatgaatctaacaaatcgttaagaaaagaatcgaaggtggtgcaaacgaaaaagcagtattgagacttttcattaactgccctttcgttttggtgtaaacgaaggggcagttctctgcaatgtcaaaactgctttttcgtttaccccatcatcgattgtaacctaaagaaattatctcgaactaaccagctcgacaaattctagtttgtccgtttcttcatatccacattatatcattttcatatctgcaccacaataaaattttatgcaccgataatcttagtgaacagctctaacaaacaccatttcatcactccaatctgaaatttaggtatgaaaaaagcagtcaatcctaagactaactgctttgtgtatagagatatgaaattgtgaaatagaatttgcctatttcaaatcaaaaagagaattttcatagtcctttacatagtatcgtatatttttacgccccttttgaataatggtatgtccctctgcttctaatttttctttctgtgcttcaataccatttggatatttagcatttaattctccgtttgcttttaatgttctccaatagggtgtttcatcttcggaacgctgataactcgcccacgctacaatagaaacaaatatacccgctgtaatcggctctgtaaaatctgcaccactcaattttgcaaagtgttctcgtatttttccaaccgtaatcactttaccatacggaacttttttcattactttgtcatagtcaatcgggggagcaaaatacattttgtttccaccatatttctcaatacttttctggtctatgataatttgaaattttggcatatccttactatcatgcaacatagcattaaaatcttttttatcttcatttgccatttgtgccacctcctactttaaggatagtctgtttcttatttccatgcaatgaggctgtttgaaaattattaacactttcaaatttgtcgctttcttcatatccatattataacagttccatatatccgccacaataaaaatcagcatacccttagcatttatggaacaaaaatgcacactttttctttcttcctcttgattaccccacaacagaaaagaaaaagccctgtcaagagccttgccaccattggtggtgctttgcactctttactgggctttttgtttgctgtatcttccatgcaagaggaaattaaagacctctgttccatttcgcctttagataatcttcatagtctgcttcattgaagtctacttgtggagaagtgtcgggaatgttgtttctgttgtctatatccgcaagctgacgaaatatccaatcatcataagggtcatggtatttatactctttgggctgttctctgtatcggtctaaccctcgcatttccttatgcacttttatcatgcgttccagtttttgacgctgtatcaactgcttgatttccataagttcttccaactccgtaacctcattggtaatgtagttatggatatactgtatgagtttatatgccttgtaaaatgtgcattctttttcatcatcgaaaaattcattttcagacaggtaatctaaggaaacattgaagtcttgttcccgtttgataatatccatgatatagggctcggtgtggtcaatatacttccattctcccgacaataattcattgggcgttacacccagcacgtccattatcttctctaacgtatcaaaggtaggataattcacgccacgttcaatcttggaaaggctctgcatattgataccgattttgtccgcaagttcctgttgtttcattcctctgtgttttcttatggtctgtatgttttctcctaagaaactgattttcttttcataatgctccataacttagtataaccgctcctttcgttgcttttcttggtatttataagcatatcatacttaatctatatctaaaagtcaacaaaaacttcttgacaagtaattctaatggagttattatcgtattagacagagtgattaagcacgctagggtcaatcacacgcttgagtaagcatataaaatatatattttcactttgatagcatgaataagcatggactatcagaccgaaaataaggtttctgactggggctgttccgtttactattgaaagcgccgtataccgaacggtacgtacggtgctgtgagaggacggcggttagtcaccgcctcctactcgattaaagtgggcttttcagagagaaaaaggctctttaaaaaaatatgataatggtgtagaattgttattatatagttttagaatgatgtttgagggtgtgtgatgattttaggactaagtgatacggaaaagaaatttaagacagcgatggatacggcaggtgccgacatgacagtggtcaacagctggcttaagctgtatgtcaaaacaaaaaagaattcctccggtgttgcaaagcgatattatggcgtgaagacaggcttaagcagcctgctttcagatttaaaggagcttgagcagcaagttattgggtatcgtgagctcacaggaaccgaccggaagcattttggagagctgataaaggcttgcaaagcgaaaagaggcatgtttgacgatgaatttttaatcagcaaggtggacacggattttcacacgactttggattctgttgtaaagcagggggagagatatctgtcatcctttgacaacggtatcattttacagagtgagatagagaatctgatacacctgacaaatgaggggcttgaaaggaaaaagcctgatttgtttgctctgtcatatttctatctggggcacagcaacaaagagcttgcagagctaaatttcacacaaaagactaagagagtgcatgagatatattacgaggagttctggaaggatatattaaagcagcttgaggcatgtgtgaagcaggctgaggccataaacgataagtatgagggcacgacagaccggcgcacggcaaggatactgtcagagcttaagccgctgcttgtgggtgttacaaagcaatgggagccggaacagacagcagagtacatactgcgcgatatgtgcaggatattcagggattgacatagaaaatgcagattgataaaggagcagaatatggatgttataatttgggcaattatcttaggagctgttttttacattaacaaaaaatcaaagagcgcaggcagcaaaaatacgcagccaaacaaaccgagaccgcagcagaagcagatgcagcagatatggaacagcatgcagaatacagttcagtcgggtatgaatgcattgaaccagacatatcagcagaaaccacagccacagatgcagcagagagcacagcagccccagagaccacagatgcagcagagagtacagccacagcagagaccacagcagagcaatccggatatagtgcagagggccgtgaaaaataacgcacgctttgcggatgatacgacacaaaaagagcttgagactatgcacggacatagcgaggcgcagcagaggatgacgcaggagcactcaagaaactgccagacactgcataccaaagcggcagacggtgcaaagattatagaggctgagacacagagcatgtttggcagtgttgaggatctgattgccatgggatacagcggcaatctggagtttgagagagatttccttggagaaggcttagacatgattaacaacttttaaataataggaaaagaggcagaaatgatggacagaacaccaaagcccggagagctttacaggcactttaagaataagctgtatcagatagttacagtggcaacacattcagagacaggggaaaagcttgtgatttatcaggctttatatgatgattttgggatatacgccagaccactcgacatgtttgtaagcgaggtggaccatgagaaatatcctgatgtgaagcagaaatacagatttgagaagatcacatttaaggataagccggaggatatgtcgggaaagagtatctcttccaacactaatgagattgcagctaatgcatctgaagctgtgagtgttcagacacaggcatgttatgagccggcaccggatgcagatgaaggccaggcaccggatccgcgtttgctggagtttcttgatgcggatacctttgaagagaagtacaatatacttatttcaatgagggatatcataaccgaccgccttatagatgacatagcggtggttatggatgttgtagttcctgagggcccattgcaaaagcggtatgatgatttaaagaatacgataaagaccaggcagtactatgaattttccaatcggctcagatagctgttgtgatatttgccggattcagtgacatcctcgccaaaccagtcaggcgctgtgaattcatttgctgcgtcgacagagtcgaattcaacctccacaagtgtaagaggagccagatcaccctcaaatacatcaagctctgcggtcagaccaccatcaagaggtatgagatagcgtgtcttttcgatgagacgaccgtcaatcttttggacaagatggtcgtatgcttcttttgtgagaggaagattgtactcctcgcgcaccataagaccggctcccttgtatgtcatataatagctgtcatttgagcgtctgactctgacaacaggcgaagtgcacagatagccctgggcgatttttttgctcgcgtagctgtctaaattggaaggaagctgtttaagtaagtattttctttcgatttccatggtatatcctttcaggttactggtagatttatagttacggtttatatttttgttttaccctcatatcatttatatatgattataatgaccggtatttaaaaattcaaggacgaaccgcggctttttagtattatcaaagaaaaataaaggagaaaaatatgattaaagtaggaatttttatggcagacggctgtgaggagattgaaggacttacagtagtcgatatagttagaagagcaaagcttgagattgaaaccatatcaatcacggaaaaatccgaggtgacaagctctcatcaggtgacatttaagacagataccacaaaggcacaggctgattttgacagctacgatgcaatcgtactgccgggaggcatgccgggtacattaaaccttggtgcggatgagaccgtagtaaagacaattaagagatttgccgctgagggaaagcttgttgcagcgatatgtgcagcgcctagcgtgctcggtgagaatcatatacttgagggcaaaaaagctacctgtcatccgggctttgaggaaaagctgctcggtgcacagtggcttgagcagcctgtagttgtggatggcaatgtgattacaagtcgtggaatgggaacagctattgcgtttgcactcgagcttgtcagatacttcacagacgatgccacagtagagcatattcgacagggactggtatactaatacaacgttcagcaaataatcatattattagtattataacaaaagaggtcacacaccaaccccatggtgcgcggcctctttttatgcttgcatttgaagcgtacatttgaagcctgctattgcagagcttatttcatctgctgctcctgcttcatgatcatctgcttgaccatctcgccaccgattgaaccggcctgcttagaagtaaggtcaccgttgtagccctcttttaaaggaactccaagctctgaagcaacctcttccttgaaacggctcatagcctcttttgcctccggtacagaagcctttttactacttgatgctgccataatgcaatacctccttttaaaacgttatacacaagctgtatgtgtatggaaatattatgccgtaaaatgacaaaaatatgttttggtattgctgacaatttatggaattatacacaaaagcaaatttaatgtaaaaaacactggaaatagtggatttgttgtgttataatcatccaatgactgggcttagcagtttaaaaagcatgcccacattacatttgatgtacataccattcatatatatttttaaggaggataacgattgacatgagtgtacaggttgagaatttagagcataatatggcgaagcttactattgaggtagcagctgaggaattagagaaagcattggattctgcatatcagaagcagaagaaacagattagtgtacctggattccgtaaaggaaaagtgccaagagctatgattgagaaaatgtatggagcaggtgtgttctacgaggatgcagcaaacattcttatgcagcagacatacgcaggtgcagttgacgagagcggtgttgacattgtttcacgcccaacagttgaggttactcagattgagaagggacagcctttcatctacacagcagaggttgctgtaagacctgaggttactcttggtaagtacatgggcgttacagttacaaagatcgacacatcagtttctgatgaagaggttgacgctgagcttgagaaccagagaaacaaaaatgcaagaacagttacagttacagatcgtcctgtagcagagggagatacagcagttatcgactttgagggatttgttgacggagtagctttcgagggtggaaagggtgagaatcatccattagagatcggttcacacacattcatcgatacattcgaggatcagttagtaggaaagaacacaggcgatgaggttgaggtcaatgtaacattccctgagaagtatcaggcagcagaccttgcaggaaagccggctacattcaaggttaagatcaacgagatcaaggctaaggagcttcctgagcttgatgatgagtttgcacaggatgcagcaggtgttgatacattagctgagtacaaagaggaaatcaaaaagaacctcacagagaagaaagagacagaagctaagaagactaaagaggatgaggctatccagaagattatcgataagtcaaagatggatcttcctgaggcaatgattgagactcagtgtgagacaatggttgaggagtttgctcagagaatcgcacagagcggtcttacaatggagcagtacttacagttctcaggcatgacagttgaccagcttaaggatcaggttcgtcctgaggctacaacacgtatccagagcagcctcgtacttgagcagattgccaaggaggaaaacatcgaggttactgatgcagatatcgatgctgaggtagagaagatggctaaggcatacggcatggaggctgataagcttaaagagtacatgggagatgctgagaaggagtctatgaagaaagaccttgctatcacaaaggccgtagatcttatcatggacaacgttaaagagcgtgcaaaggcaaagaaaaaggctgatgcagaagagtctacagaagaataagatttttgaatcaaaatttgatggactggctcagaagcctattttctgagccggtcttttgagcttttataaaggaggcattttatatgagtttagtaccatatgttattgaacagaccagcagaggagagcgcaactacgacatttactccagattattaaaagatcgtataattttccttggagaggaagtaaatgagacaacagccagccttgttgttgcccagcttttattccttgagtctgaggatccgaataaggatatccacctttacatcaattcaccgggtggaatggttacagcaggacttgctatttacgatactatgcagtacatcaagtgtgatgtttcaacaatctgtatcggtcttgcagcaagcatgggagctttccttcttgcaggcggtgcaaagggcaagagatatgctcttccaaatgcagagattatgattcatcagccatcgggcggtgcaaagggtcaggctactgagattcagattgctgcagaaaatattttaaagacaaagaagagattaaacgaaattttagcagccaatacaggcaagccatacgagacaattgcagctgatacagagcgagacaactatatgtcagcacaggaagccgcagagtatggtctcatagacagtgtaataacaaacagataatcagaagttagatgaatttaagagggtaccccatatgggatgccctcatgcaataaaaggagttaataatggcaggaaaaaacgacggaaagattcgctgctcattttgcggtaagacacaggaccaggtaaatcgtttgatttccggacctaatggagcttttatctgcgatgagtgtatagatatatgtgccgagattcttgaggaagaaggcgtagagggccatgaggacaaaagcagcgctaaggatgatataaatcttgttactccggaggagcttaaggcgtttctggacgattatgtaataggacaggaccaggcaaagaaggtgctttcggttgctgtttacaatcactataagagagtactggcaggtgatacatcagatgtagagcttcagaagagtaatattctcatgcttggacctacaggctcaggaaagacacttcttgcgcagacacttgccagagtgataaatgttccatttgctatcgctgatgctacaacacttacagaggcaggatacgtaggtgaggacgtggagaatatcctattaaagcttattcaggcggcagattatgatatcgagcgtgcagagcatggtatcatttatatagatgagatagataaaattacaaagaaatcagagaatgtctcaatcaccagagatgtgtcaggcgagggtgtacagcaggctcttttaaagattcttgagggcacagaggcatctgtaccgccacagggcggaagaaagcatccgcagcaggagcttattcctattgatactactaatatactttttatctgcggtggagcatttgatggtctggaaaaaattatcgacagtcgtatggatacatcatctataggcttcaattcagacgtaaagtcaaagacagagctcaatgtaggagaggcgtttaagcatgcacttccacaggattttgtaaagtttggattgattcctgagtttatcggacgtgtacctattaccgtttctctcgaggcactcgacagggatgcacttatccgtatacttaaggagcctaagaactcgcttatcaagcagtacaccaagctttttgagcttgacggagtagggcttgagttcacagacgatgcagtaaatgccatcgctgacaaggcacttgagagaaagacaggggccagaggacttcgtgccatcatggaggctgttatgcttgaccttatgtatcgtataccgtcagacaagagcatcagcagatgtgtaatagacaaggatatcgttgaggaaaacttaaagcttgatggtgattgcgtgcctgaggcatatatcgaggaaaaagcggcatcgtaagtacatggcggtattttacaaaagatacagcatcggataatataaattgcacagcggtttgttatgcatggctgtgtaataatacaggagatataagtggaagaacagattatgaatatgcctgcagtagcgctgagagggcttactattctgccggggatgattgcccatttcgacatcagcagagagcgctcccttcgtgctgtcgaggaggctatggagcaggatcaaaagatttatcttgtcacacaaaggaatgtggacagtgaggacccgactcaggaagacctctatcagatgggtattgttgctgacataaagcaggttgtcagattacagaatgatgttgtgagaatacttgtagatggaataagccgggcagcattgcttggctttaccggtaatgagaagtaccttgaggcagaaatctgttattgtgatagtaatgcagacagcctgccggatgatctcagggaagccatgcttctcggagtcagagaggcttttcacagatatgcggcagtcgtcggcaaaatcagcaaggagcttatcagacagatagatcagtatgaggatcttgaaaagctcattgattatgtaaccaacaatctgccggtgtcatatgagcttaagcagcaggtgcttgaggcagaggatatcaatgacagatatcaggttatagtatcattacttctctcccaggtggaggttatttccataaagaatgagcttcagaaaaaagtaaaggttcgtgtggataagcatcagaaggagtatgtgcttcgtgaacagcttggtgtgatacgtgaggagctgggcgagaatgctgactcggaggctgatgaatatgagaaaaaactatctgagttagatgcgcctgactacgtaaaggaaaagacgaaaaaagagataaagcgctttagaaatatgagcagcagctcatcagagagcacagttgagagaggctatatagagactgtacttgagcttccgtggaacaagatgtctgtggataacaaggatcttgaccatgcagcacaggtgctcgatgatgatcactacggattaaaggatgtcaaggagagaatacttgagtttctggcagtcagaaatctgacaagcaagggagagagtcctataatttgtcttgtaggtcctccgggaacaggaaagacaagcatagcccgttcaattgcgtctgcactggagaagaaatatgtgcgtatttctcttggtggcgtgcgcgatgaggcagaaatccgtggacacagaaagacatatatcggcgctatgccgggccgtatagtaaatggcttaagacaggccggcgtttcaaatcctctcatgctgttggatgagatagataaggtgtcaagtgactacaagggtgacacatcagccgctcttctcgaggtgcttgacagtgagcagaactgcagattcagggatcattacatcgagatgcctgtagatttgtcggaggtgctttttattgcaactgcaaatgaggtttcaggcattccaaagccgcttcttgacaggatggagcttattgaggtgtcaagctacactgaaaatgagaaatttcacatagcaaaggaacacctaattgagaagcaaaagagcaaaaacggaattaaaaaggaacagcttacgataacagatggtgctttaaaggatatcatcaggctgtacaccagagaggccggagtcagaagccttgagaggactatcggcaagctgtgccgcaaggctgccagggaaatcttcaaggacagcgaagctgctgtaaaggttacaaagaccaatcttaagacgtatctgggcaatccgaagtacagtccggagaagaaaaatgatcacgctgaggtgggaatcgtaagaggactcgcatggaccagcgtgggcggagtcacactcgaggttgaggtgaatgtgctgccgggcaagggtgagctcgtgctcaccggtaagctaggcgacgtgatgaaggagtcggcacaggcggcacttagctatgtgcgctcaataagcgaagaatatggcattgatgcagagttttatacgaagcatgacatccatatacatatcccggagggcgcagtgccaaaggacggaccatccgcaggcatcactatggcgacagccatgctctcggctattacagacagagctgtcagggcagatgtagccatgacaggtgagataacactgcgcggcagggtgcttccgataggaggactcaaggaaaaactgcttgcggccaaagtaatcggaataaaaacagtatgtattccaaaggataacgaaaaggacctggaggagatttcaaaagaaataacagacggcatggaaatcgtgccggtggagagattttcacaggtggagaagatagcatttgtaaaataagaatgaggaagagattatggtaattaaaagtgttaatttagagacagtttgcggaattacaagcacaatccctgacaatgagtataatgaagtggcatttgccggcaagtcaaatgtaggcaagtcgtcactgatcaacgcactcatgaacagaaagtcacttgccaggatctcttcacagcccggcaagacacagaccatcaatttttataacgtcaatgacgccatgtatctggtcgatctgccgggctatggctatgccaatgccaatatcgagataaaagctaaatggggacagatgatagaaaactatcttcacacctcaaaaaagcttcaggcagtgtttcttttaatagatataaggcatgagccatcggacaatgatatcatgatgtatgactggatggtaaaccagggctttgcaccgatcatcattgcaaccaaatctgataaattgaaaaaaagccagattgctgcacacataaagactatcaaggatgtgcttcatgtgaagccgggcacggtagttataccgttttcgtccatgtcaaaggaaggcagggacgaaatctggaatctcatagattcactcgtgtttgacgaggagacgcttcttgccatgaagcaggaggaggcagcaaagcgcgaggctaaatcagctgcaaaaagagctgctgcatcccagccgcacaaaaaggagcgctggaagaagaccgggaagccggttgccaaaaagactaaagaacgcagagataaggccaagagcaaaaaaagcgttaataatcataaaaagaaataaagttatagaaagaaaggcgaatatttaatatatgaagaataaatgcaaatttgtaggcattatgtttttgtgtatattgatagtgtgtacgcttgcggtaatggcatatgagcacacagcaggtatgaaaggcgctgccggtggagcatcaaatgcttcgggcaatacaaaaaatactgacgaagcagacgatatgcttactgtcgtgacatccttctatcctatgtacattgccactttaaacatagtggatggtgtgaacggagtgagactcgaaaacttaagcgagccacagaccggttgtctgcacgatttccagctaacaccggaggatatgaagcttttatccacagccgatgtttttgtaataaacggaggcggtatagagtcgtttatgtcagatgtggcaaaggcgtatccgaagcttgatgtggttgagacctgtgaggatgtggcacttctttctgaggatgatgcagacagtgaccacgaccatgaccacgacgcagacacagaatcggacagtgaccacgaccatgaccacgaagcagacgcagaatcagatagcgcgcatgaccatgaccacggtgatgagaatgcccatgcatggatgagcgtgccgcgttaccgcaccatggttcagacaatcgcatcccggcttgccgaaaaggatgcaaagcatgctgatgaatattatgcaaatgcaaaagcatatgatgcaaagcttgcagtgcttgaagaaaagataaatagcataaagagtcttaccaatggacagaatatcatcatattccatgaggcctatgcgtatgtagctgatgatttttccatgaatgcatgctatctgttagaccttgacgaggagcgctcagtcagcgcaggtgagataaagcaggtaataggtgccataaaggatgacggagtgtcggtaatactcgctgaggagctctacggaaagagcatgggagatacagtatcgcgtgagacagatgtgcatgtgatttatatcgaccctctcaacaggggagagtacgacaaggacagctatcttgatggtatggagcacaatatagagcttatcaaagaggcatttactaaataaaattggagaaaatatgcggaaaataatacagccatgtggctttcattgcataaaaataaataaccttggagtgagcttcggagagcagacggtgcttgaggatgtaaatatgcacatacattgcggctccttcaatgtcataataggccaaaacggtgccggaaaatctacactcataaaggcgatactcggcgagatacctcacaccggtacgattgagttcaaggatactaaggacggacatatggctaagcttaaaatcggctatgtgccgcagtctgtcaatatcgagaaaaatacaccggtcagcgtgtatgacctcatagcaagctatcagtacaattatcctgtttttctgccaaagagcaaaaagatagaggcaaagataagggagacactcgaggtatttgaggctgaggagctcatcgacaagcaggtgtgcaacctctcgggaggacagctgcagagagtgcttctttccatggcaatcatggacgagccgaatctgctgctgttggatgagccggtgtccggaatagaccaaaacggcatggagcttttctataagaccatggattatttaaagacacactatgaccttgcaatcatactgatatcgcacgatttggactatgtggcaaagtacgcagaccatgttgtgctgcttgataagaccgttgcaaagcaggggactgtgaaggaagtcttcgagagcaaggaatttgagagaattttttacacaggagaggaatcctgggtgagagaggaggaacacaaatgaatataacctcctggcttcaatatgatttcatgaaaaatgcccttatcgccgtgctcatcatcacaccgctttttggcataatgggaaccatgattgtaaacaaaaagatggcatacttttcagatgcactcggacattcagcacttacaggaatcgctgtcggagtggtatgcggcatggcagacacctcgcttgccatggtgatatttgcgatagtgtttgcacttcttttaaataagataggcagtctgaacactgcatcgacagataccattatatcggtattttcatcgtgctctgtggcgataggtcttgcgatactgtcaaagggcggcaatttcagcaaatactcaagtatactggtgggcgatgtactaagcatcacaaagactgagatagtttatttaattgtgatttttgtggtcacgatagtattctgggtgctttgcttcaataagctcaacgccatatgtatacacagaagcgtggcaaaaagcaagggtatccatgtgcgtcttctggataatctgtttgcggtgcttgtagcactcatagttatgctatccatcaagtggataggtatacttataataaatgctctgcttatattaccggcggcttcatcaaggaatatttcggaaaatatgcgtgagtatcatttcttttcagtgatattttcagtattttccggtatagtcggcctcgcagtgtcatactacaccaatgtggcaacaggtccgatgatagtgattattgcatcggtaatatatttttcgacatttatatttggcagaaaattgaaaaaataacggcaagggctataagaaacagaatatgatatattagagggactgcgcgcaacgtgcagtccctttttaggttaatttgactgatgagatgtaaaaattaacaattaaatgagaatatttaaatttgctctttttggcagggtgtgttataatccttgtatacaaaaaacagaggtaatacaatatgggtagtaataacgatatttcattaaaagcattagccaagattaatctggggctcgatgttgtgaggcgcagagaggacggatatcatgaggtccgtatgattatgcagaccattcatctgtatgacaggcttgatatcaaaaggacaaaggagccgggcatacagatacagaccaatctgtcttttctccctgtaaacgagaacaatctcatatacaaggctgcaaagcttctgatggatgagttttctataactgacggtgtatcagtgaagctggacaagcgtattcctgttgcagcagggatggcggggggcagtactgatgcggcagctatgcttattggtgtaaacaggcttttttcactgggactgacaaagaaacagcttatggaaagaggtgtgcagataggtgcggatgtaccatactgtattatgagaggcacggcgctggccgagggcataggagaggcgcttagtcctcttcctccaatggtaaagtgtccggtgcttattgcaaagccgtccatctcggtatccacaaaatttgtgtaccagaatctgaagcttgatgatacgactattcatccggatatagaccgcctgatagatgatataaaggatgatataaaggctaagaatctgcatgatatcgcagcacatatgggaaatgtcttagagaccgtgaccataccaaactatccggtgatagacgagataaagaagcatatgctttcaaatggcgcggtaggagccatgatgagcggtagtggtccgacggtttttggactgtttgacgatgaagatactgcaaagaaagcgtacaaagccatgagaagctcacatcttgccagacaggtgtatctgacatctgtatacaataatcgcaaataacgtgatatccggatagcacagcgggtgctttatagttacttttttcttatatgtgagaatgataatacaagagataggagaagtttgatgactgataatttaactttaaatatggatgcatatctgccactgcgtgatgtggtgtttaatacacttcgtgaggcaattttaaagggagagctcaagccgggagagagacttatggagctgcagcttgcgtcaaagcttggagtcagccgtacacctatacgtgaagcaatcagaatgcttgagcaggaggggcttgcagtcacaatgccgagaaagggcgcagaggttgccaagatgactctcaaggatatggaggatgtgcttgaggtgagagaggctcttgatgagcttgcagccaaaatagcctgtaagaaaatcagtgatgagcagcttgcgaatttaaaaaccataaaggacgagtttaagaggagcatggactcaggagatgtgaaaaagatagctgaggaggatgtgaagtttcacgatgctatctatgaggcgaccaacaatgcgaagcttgtatctatgatgaacaatatccgcgagcagatgtaccgctacagagtggagtatttgaaggacccaaagaattatccgatgcttgtgaaggagcatgatgccatctacagggcgcttgaggcaagaaatatggagcttgtgactacagaaatgcatacgcatgtggcaaatcaggcggttgctgtgaaggctgtgatacaaaagcaggatgaagagaagaaataaaacagaaatataacaagattatagctgacaaagataataaaatacaaaataatataacaaaaccaagggctgccgatcgcactgatgtgtgaacggcggccctttttagtggcttagttagtggcttagatagttacaaaataaacaatcagggatatttgcgaacttgtatggtcatactatatcagggattttaaatctgacgggatttattgggtatataggagagttaaagatgaccacaaacatagatgagaacataaaaagcttcaggcagatatattctgactgctcagatatcaagatgcaggagatgtatctggggcgtgatgcctgcataaagtgttttgttgcttatattgaggtgacatgtgcaggctccggtatcaataacagtgcgtttggacgatttacatcataccttgaagggatagaccggaatcaggttaaggaagtacttgacaaaaatcaggcagctctatccgaatttgcgcatcttcatacggttagagaggcagcccagatgatgctgacaggagacgtgatattttttgtggatggctatccggatgccttcaagcttcccgacaagggatatcccgccatgtcaattcaggagattgattcggaaaaggtcataagaggctccaatgagggctttgctgattccataaagataaatactgcacttatcaggcgcaggttaaggagcactcgcttaaagtgtaaagaggtgaaaaaggggcttcgcggacacagcaatgtggacatattgtatgtgagagacctcgtaaaaccggggcttgtagaggaagtagaaaagaatctggacagctatgtgatagaccatgtgggtgactcgggagttcttgaacagtttgctgaggcaaaatggtattcaccgttcccacagcttcagaccacaaagcggccggatgtggcggtaaatgcgctcctagaggggagggtggtggtgctgtgcgataattcaccgatagcaataatactgccaaccaccatgaacaattttttaaaaaccgcagatgattactataacagaacgatagcggcaagctttgccagattgataaggtacgtggcagccttcatgtcatttacattgccggggctttatctggcggtcacaaattttcatacacagatactgccgacacctctcatactggcattttatgaagccagactcggctgcccgtttccgcagctcatagaggtgctcatgatggagctgtcctttgaactgcttcgtgaagccggcataagacttcccggagccatgggaaatacgataggcatagtcggaggcctcataatcggacaggcagcagtggatgcaaatttagtaagccctatagtggtcatcctggttgcattcaccgcactctgctcgtttgccataccgagtgaggagtttgcattttcatttaggatactcaaattcgctgtaataattatgtcggcatggcttggatactttggatttttaataagtctgatggtgatacttttgcatcttgcaaagctcaaaagctgtggttacccatacatgatgccatttgtgggcagcgagctgacaggcggcgaggatgaaaaggacagtatcatacgatttccgcttcgcagactttggaggcggcctgtgtttgcaagagaaaaggagtgcaggaagctgaaaggaaataagtatgactaaaaatatgggtaaaagagatacatttgcacaaaacgaaagcatatcgccacgccagctatacagactatacgtctttaatctgcttggagtcggcacactggtgcttccaaacaatctggcgaaactgggaaagtatggttttatctcaatcgcacttggtgttttcatggcatggctgtttatgtggatagtaagcgaggtacgagaacagaagaaaagtatatatgacagaagctttggtaaaacagcacatgcaaaaatgttaatttatgatttaattattgcaatatacgagctgtcacaggccgcatttcttgcatggatatttgtaaagctgatacgtgacagccttataccggatgagtcatttacagttgtacttcttgtgataatggcggtatgcgcttatgcgctaagtggcggagtggagtgccgggccagggtatacgaggtagtatttttctttgtgctgataccgcttgctgctatgcttttgtttgcgctatcggatgtgagatttgactatctgatgattaaggacagagtcggtgtggactttggcatagcggatatatttgcgggtgcatactatgtgtttgcagcatccatttccgtgttcaatatactgtttgtaagggagcgcactgcctcacagatacgatggagtgtgagtaaagcaatactcacatatgcaggcattctttttttattgtatgcagtattgcttgggagcttcggaaaatattcattgtcagaaatcgagtttccggctgtcgtactgatgagtgatgtgcagataaagggaagcttctttaagagggcagatgcactgatgctgtcggtgtggtttttcacgctgttttcagtgctcattatgagcctttattatgcggttttaagatgtgagaattttgctgaaaatacggggaaaattatatttacatttaataaaaaccggcattcctgcagcaataagcaatttagctctgacaaacagaaaagccatgacaaggaaaagagcactatgagaagctggtgcatcatttttgtcatagcagtcacattgaccttagcatatattcttgaaagtggagatgaaatcgtgaaaaaatatcttggatttttaatgtgcatagcgataccggtcatagtagtgctgacgataggtctcatgcttaccggctgtagtgcagtggagcttgaggagcgttgctttccgacacttgctgcggtggatgttgtagctgtagatactgacgaaataaccgataaagaagtaacaggtaaagatgtaactgattacaaagaatatgttagccacagagatgatttggcaaatgaaagtagcggatatatagagttttattataacatggacaaatcctatgagcccgaatatgcagatgatatcaaaacagccgtggacagcttcgaggagcggctgtcacaaaaagccgataccaatcatctgaaggtgatattaataggaaaaacgcttagaaatgataaagcagcttatgcaagcttcatggaatactgcaagacatccaaaaaatttccgagaaacacatatgtgtgcatagcagatgatataaacgatatctttgataacatgggtgattattatgagcagaaaatgaataaggagaatcatgaggatggggaaccgataattacacttggcaccttattggatgactatacgaatgaaactcatggagcatggtaaaaatttcaaaaaggatgaataatcttttcaaataaggcaatacttgtttacatgagaaagaaaataataataacaaccatagcaataatatcccttacggcagcgatagctgcaaaaaatcatacacctgccgcaaacaccaatagtatagcgtgtacagccgacatgcaaaaatccatcgccggcaaaatcctgcgtttccacgtgctggcaaacagcgacagcgaagcagaccagaatgtgaaaaagcaggtgcgcgatgcagtaggggcttacatagagccatatctgctggagtgcgaaaatatcgaacaaaccagagccaccgtaaatgaccatatggacgaaataatagcggtatcaaaggagacgcttgcagcaaacggttttacatatggcgcatcggcagagcttacacacaccgatttcccggaaaagacgtatggggactatacatttcctgagggaaattacgaggcgcttgaaataacactgggcgatggagccggtcataactggtggtgcgtgctgtatccaaacatgtgctttaggggcagtgtgtacgaggtggtggaggacgaagcaaaggaaaatcttaaggaggtactcactccggacgagtatgagagcatatttgacagtggaaaatatgaaataaaactaaaaatccttgatattttcagataaaacagttagtatattcatgctgaaaaaatatattaaaagaaaatatgtgatgacaaattatttaaacgtgaattaatttagatatgcaagaggataaggagaaagaaatgacaaaggatgtagtagtatcattaaagggcttacagctcgcaccggaccagcagtcggatgcggtagaggtgattgccccgggagagtattatataagaaataacaagcactatgtgctttttgaggagataatggagggtgagacccagacactcaaaaatatgcttaaattcaatgaaaattatcttgagttcacccgcaagggacctatgagtgtacatatgatatttgagaagggaaagaaaaacctgacatattattatacaccgtttggaagtatccagataggtattgatgccacaagcatagaggtaaaggagactgaggacgagataagggcagaggtaaagtatgcacttgatgtcaactatgaatttgtaggcgactgtcacatcaatatagctgtgaagaaaaaaggcgcagcagtcaaaattgcataaaagtctgccaagcctatggggaaaaaatatataaagcatatatggatagagcatataaaaaacagagcatgtgaggatgaaaaccatcccacatgctctgtttatgtacatgaaaattaaatcatgatattatttctgcttagcctttttggcagctgctttagcagcttttctttcagcctttgcagcctcctcagccttgagctgttcgttggccttgctgtagttttctgccattcttgcacggaagccttttttcttcttaggcttctcaagaggtcctctgataccgcggacagctgtgatgtagataccgctgacagaagccttaacctctttctttaaaggaatctcatcaaagatctgctcgtctgcgataagagtcatgactcttggtccgaccttggccttgactacaggcagctttgagcggcgcataagctttggtgtctgctcaataatctgctgtgggagaccggcatcctttagcttcatacgctttttgtcaatgattagcatattgacagtctgtgatgctgcagctatctgctcgtcctgctcttcctttcttttttgtgcttttttaccgaggattgttaatactataaatgctaccacaagcactactgcgataacaataagtacgattaatgctggattcaaaacgtatccctcctaaaaatttgcttatttaaattaattctatcaaatatgctaaaaaaaatcaatctttattgcaagaataggtaaaaccgtagtataatagaactatattttgggaaaagtctttagaagatgcaaaggggtatttattaatgaagaaaattgctcttctagctgatggctggagaagatatgtaacatattcgtgggttgagggcatcatggaaggctctaaagagctgggactggatgtgtgcctgtttttttacaacaccaacggaacctggagtcaagatccaaagtttaacaaaggcgagtatgcgctgaacgatttgcctgatttaaacagcttcgacggagtggtatttgactgcaccaatacgatcaaccaggatgagatacattatatggtcagaaagcttcagtcggtaaatgtgccggtagtgagtatcgggtataaggttgatgggttttactatgtaggcaacgacagtaagaggctgtttcgcaaggtaatggatcatatgtactatgcgcatggctgcaaaagctttgtgtttgcaggtggtccgccgtatcattatgagaacagaatgcgttttgaggccttcaaggaggctttaagtgattatggcataccacttacagctgatatgtacatgtttggtgattttgattatcagacaggcgtcaggtatatgagtgattggcacgagagcaaaaagccgttaccggatgtctttttatgtgcaaatgacaatatagcagcaggactgtgtgcgacagcagaggttcttggatacaaggtaccacaggattttaaggtcacaggctttgacaatctggataaggctgcgtattttaacccacagattacaacagtggataacaacaggggcaatataggcagaaatgctcttgagatatttaaggcgctttggaatggcacgggcgatgcttctgataaataccttgattctgagtttatcccggctgagagctgcggatgccctaataccggcagagtggattatcgtaattacataaagaatattatcaaaggctccgttgcaagagagcaggaggaggatgcagtaatgatcctccagaaagagctcgaggagtgcaatgaatactatgatttgtttgagagatattctgactatatacagagcatgaagtgtgacggagtgtatgtggtcggtgtttctgatctggcagctgcaaggaacaatgcacactttaggaagcatggctatgatattgacgacgaggttgtactctatgcggatgacaaggacaatggaaagcttgagtttaagagtgtaaatgaccttatgcagtacatgcagagtgtagataaaaacacctgctatatgtattgctcgctgcatttcagggacgagatagtgggctatgtaatactcaggaatcctgaatttttgtacgaccatcctgagcagtttgatatacagtctgcccttcttaagaagcttgagaatctttttaagcaaaaggtacttgagaatacaaataatgagcttaagaatctctacaaccatgatgcgctcacaggcctatacaatcgtgtggcatgcaatgagatggtcattcctatgtttgctgagcttgaagaccaaaatgtcggctgcaccatagtatttctcgatgtggatgattttaaggacataaatgatacatacggacacaagtacggtgacgagcttttaaagactgtggcgagggtgcttgatgagcaaaagcctgaaggaagtatggtatatagattcggtggagatgaatttatcgtgtttatccccggggacaggcatgacactgctgagaagtatataaagcgcgtgtatgatatcatggagcagcacagcctgtttatcagtcacggcatcatatatacgaagccgggcagtggtaagagctttgacgattatctcgtaagtgctgacacaaagatgtatcagcttaagcagcagcacaagcagaaaaaggatagcaatttcttaaagggagtggatatttcatccgttcctatgatggttgacaataatatacaaataatggatagggaaggtcatgtgtgcagggtatttgattttttaaagctgaataatgtaaattcagtccgtctgcgcatatggaatgagcctgataaggtgccggagtctaaggggtattgcagtcttacctatgttctcgagatggctcatgtcattaaaaaatacaaaatgcattttctgcttgattttcattattcggattactgggcagatcctagacagcagaataagcctgatgcgtggaagaatttgagctttgatgagctgaaggaggcagtgcacaagtacacatatgatgtgctatacagattaaaaatcatggattgtgcgccggatatggttcagattggcaatgaaataaggagtggtatgctgtttccggatggtgcagtgccacagtacaggcagctggctgcgcttgtaaatgagggaatcagagctgtcagggagctgctcccggagacaaaggtcatgattcatctggatcagggaggcagatataactgtattatgccttggcttgattctatgtttaatgcgggcatgctgccgattgacgcgattggcctttccttttattcgttctggcatggtaccttcatggatttgaaggatactatgagcaggctcataaaattatataatctgccggtttatattgtggagacagctcatccgtggagacattgcaaaggagatcatatctcgaaggaactcatggagactgcaggccttgatgcaggcagcgcagagcagaagaagtctcttgaaataatcatgcagatagcagcagaggtgtcaaaggataccggaaagaccggtgtatactactgggagcctgtcggtgtgcctggtaaaggcatgggaacctggtttgagaatatgggtatgtttgacgagcatggcagggctttgcggggctgggatgcaatcagggactttgatccgaaaaatcctccgattaaagagcttgataagtatattgaatcactttatgagtatgaagaaacaccggaggtggaggatttcatgaagcttcttatgattcatggaaatctaatctcaaatcctgaatttaaggatggatttaataattggcagattgagacaagcctcgaagaaagacagtatacactgggtaaggatggagtgtttatctcttcggatgccaattttgactattcgataagccagacggtggatattgaatataccggtgagtatatagcagcggttgactatagaggaaccaatacaacaggtgtcgaggtcgagctgtttatggatgtggaggatgaaagcggcgttcatacatatacaagcaacattttcccggctgatgtcaggtttgtgacacatctgcttaagccggtaaggctgcaaaagaatgccagggtgacagtagggcttaggatgcatactcctccggtgtttgcaaagataaagaaaatttcactcgttgtaatttgacctgatatgtgatattgtagacaggtatagtgttttgcggatgcgtttttgccgtggcagggcattgtacatataaataacatgatttacagatttcaggaggattccaatgagtgagaagaagaatacaggtaagaaggcagtcatagcagtgattgtgattgcacttatcgtggtaattattgcgcttgttgctgtaataagcggcaagagcaaaaagggtggctcaaagagcgcaacagaggcaggcactgaggccggcagcgagacgatgcgaagcggacagtttgacatagactacgcaaagcaggttacaaagcttgcagactattcaggtattgcaattacagtctcaaacgattatgagataaacgatacagcaaagcagaaatatctgaccaatgtgcttcagtcatatggtgcagatgcgtacaagcaggttacagatcgtgatacagttgcagatggcgattatgtcaaggttgattacacaggatataaggatggcaaagcatttgatggtggctcagctacagatgtgatgcttgatgtgacaaataacagccaggtcggcggttcatcctttattgatggatttacaaagcctataatcggagccaaggtgggtgacaaggttaagggtgacgtgacatttcctgaggattatggcaatgacgacttaaacggacagacagttacatttgagtatacagtaaagggcatttactcagcagatcctgttgcacttgctgatatgactgacgagcaggtcaacacagtgtttggaaaggccggagtgacaacaaatgcccagcttaccacacagattgagaaggatttgaagcagcagctctacagcgctgaggtagacaagataaagagctacatgattgaaaacagcacagtcgagattcctgatgagtatttacaggccagactcaatgagtatattgcttcatttaccaaggaaaatgtcaaggatggacagacacttaagaaatatttaaagtccaactacaacatgacagtggatcaggccacagagaagtggaaggagaatctgacagaacagataaagacagagttcatctttgggcttatcgctgagaaggaaaatatcaagatggatgatgatgccttcaacagctatgtggattacatcgtatcagccagcaatggtcagttcagcaaggcttctgaggtatacaagtattttggaagcggacacaaggatgagggaaagacataccttaagaaccagtaccttgtaaacaaggctattgatacagtcacagagaaagcaaatgtgacatttgaggatggcagtgcagcgccggatacttcaagtggcagcgcggatgccgaataataacgataaatatgctgtctgtggtgatgcgcaggcagcttaaatggaggattagataatggaacttacaaacatacgcgagattttccgcaacaaggacaaattcgctgacaaagaggtgactatcggaggatgggtcagaagcaatcgtaattcaaagaattttggatttatcgtggtaaacgacggtacattttttgagccaatccaggttgtatacggaaatggcttagacaactatgatgaggttggcaagatcaatgtcggagctgcaattatcgtaagaggtacacttgtgctcactccggatgcaaagcagccatttgagattcaggccgcagaggtgactgttgagggggcatccacaccggattatcctctgcagaagaagagacatacatttgagtatcttcgtacaatctcacacttaagacctcgtaccaatacttttgaggcagttttcagagtgcgctcactctgcgcatatgctattcacaaattctttcaggagagggattttgtgtacgtgcacacaccgcttatcacaggaagtgactgtgagggtgcaggagagatgtttcaggtgaccacacttgatttgaacaatctccctatgacagaggaaggaaaggtggatttctcaaaggatttctttaataagcctaccaaccttactgtttcaggacagttaaacggcgagacatatgctatggcattcaagaatatctacaccttcggacctaccttccgtgcggagaattcaaacactacacgtcatgcggcagagttctggatgattgagcctgagattgcttttgcagaccttgaggatgatatgatgcttgcagagagcatgctcaagtatgttatcaactatgtgcttgaaaatgcacctgaggagatggcatttttcaacaatttcgtggacaagggactccttgacagattaagaaatgttgttgaaaatgattttgcacgtgtgacatacacagaggctatcgacatcctttcaaagcacaatgacaagtttgattacaaggtatcatggggctgcgatttgcagactgagcatgagagataccttacagagcagatttataagcgccctgtatttgtcacagattatccgaaggagataaaggccttctatatgaagctgaatgacgacggaaagaccgttgcagcagttgactgtctcgtgccgggaatcggagaaataatcggtggaagccagagagaggatgactacgacaagcttcttgccagaataaatgagcttggactttcagaggatgactacaagttctaccttgacttaagaaaatacggctctgcaagacacgcaggctttggattgggctttgagagatgcgtaatgtatcttaccggcatgggcaatatccgtgacgttatcccattccctagaacagttaataactgtgagctgtaatcacgaatgaatttcatacatgaataattaccgccctttgcacatatatatgatgtgtggagggcgtttttatgtggagaaaaatcaaaggtcctgtgataacaatatgtatcatgcatcttacggcgcttttgtgccttatcatactttctatagtacagtgctttgtcgacatggcggagtggataaagtttgcacttgccatggcggtcaatatagtggtggggcttgtgtgcggatttttgctcaaatgctgctttcaccgcagacgttttatcagggtgacggtcgtagcatactggataacgtatgtgatagcaacagtggtcatagatataggtgaatcaaaaaatatattcgagcttttgataatactccttctggtaatgttttcagcgcttgtttttcgctaaaaaaggacttttcatattgataatgctgtgatataatgttgaaagcaaatatgatgtgtcaatgagacatcgttaaatgaaaaggagataaaaatgaaacacgtaaagacattaaatacaagaaaattacagaacacagttaaaaagggcggatgtggcgagtgccagacatcatgccagtcagcttgcaagacatcttgtacagttggaaaccagacttgtgagcagtacaaatagtcataggtgaagcggatttaaagagtgtgcgctgataggtgcacactcttttcgcagtgtaattttaaaatgtgtatagaaagagaggaatattgtagtggttcatcagtacaagaacaacggctataatattgtcttagatgtcaacagtggcgcaatccatgtggtggatgatgtcacatatgacgttattgagctgtttgaggacaactcagctaaggagattattgaaaagcttgtggacaggtatccacagacggagatagaagaagcaatacaggaagtaaatgagcttaaggataatgaagagctcttcacagaagatacatacaaagagcgtatcatagatttcaagaagcgccagacagttgtaaaggcactttgccttcacatagcgcacgactgcaaccttgcctgcagatattgttttgcagaggagggcgagtatcacggcagacgagctctcatgagctatgagaccggaaaacaggcacttgattttttgattgccaattcaggcagcaggagaaacttagaggtagacttctttggaggagagcctcttatgaactgggatgtggtgaagcagcttgtggcatatggaagagagcaggagaagcttcatgacaagcatttcaggttcacgctcaccacaaacggtgtgctcttaaatgacgagattatggagttcgccaacaaagagatggacaatgtagtccttagtatcgacggacgcaaggaggttcatgaccgcatgagacctttcagaaagggtgccggcagttatgaccttattgttccgaaattccagaagtttgcggagagcagacatcaggacaagtactatgtgagaggtacatacacacatttcaatactgatttttcaaaggatgtgcttcatctggctgatttaggcttcaagcagatttcggttgagcctgtggtggcacagcctacagatgagtatgcacttaaggaatctgatttacctgtgctctttgatgagtacgacagacttgcagcagagatggtaaagagaaacaaggcaggaaacggcttcaatttcttccattttatgatagatttagagggaggaccttgtgtatataagcgtctttccggttgtggctcaggaactgagtacctggcagtgactccatggggagatttatatccatgccaccagtttgtgggcaatgaggacttccttatgggtaatgtctgggatggcatcaaggccactgacatccaggatgagtttaagtgctgtaatgtttatgccaaggaaaaatgtcgcaactgttttgccagattctattgcagcggtggctgtgccgccaactcatacaacttccacggcacaatcactgatgcctatgatttaggctgcgagctgcagaagaagcgtatagagtgcgctatcatgattaaggcagcagaggctgatatggcagatgatgcacaataatttgaatttgtcacgggaaacggatagcggtatttgtgacccgtgtgcgaatatatttgccatctgtatacctatatggatggtagcaaaatgacaggaaggtataagaaaatgaaaaaaggaaagagttgggtgattatccttgtggcagtcatttgtatcggcttgctgggctggtattccactgcagtaatcaccgacacaaagcaaaagcaggaggcaactgctaatggtgagagcaccaaggataaggattatcagaatatcaagcttggtctcgacctctcaggtggtgtttcaatcacctaccatatcaaggacaagaatccttcagacaaggatgtaaatgatactatcgcaaagctcgaggagcgtgcagagagctacacaacagagtactctgtatacaagagcggggatgaccgtatcactgtagagattccgggtgttgacgaccctaacaaggtactcgaggatcttggaagtccgggatcactgtacttcatcgcccagtatgacagtgacggaaatgccaactatacacaggacacatcggttgagggcggctacaagctcaactatgatattgacaccttaaaggccaatggctcagtcatcctcgatggtaacgatgtaaaggatgcaagcgcccagtatgaccagtcatcatctacatcaaccaaggagcctgttgtttcattaaagctcaaggataaggctattgacacatgggcagatgccacaaagaaggcaaaggatgcaggacagtcaatcggtatatactatgatgatcatttcatcagcgttcctacagtaagcgccgttatctcagatggtaactgtgtaatcaacggaatgaaggattacgacgaggcaacaagccttgcaacatttatccgtgtcggagccatcaacctccagctcgaggagttagagtcaaatgttgttggcgcacagctcggtggaacagcgctcacaaatgcagtaaaggctgcaattatcggaattatcttaatcatgatattcatgattgtgctctatggtatactcggtgtggttgcatctatcggacttgcactctactcaatgcttacagtactgtttatttactggtttgagattacacttacactgccgggtatcgcgggtatcatccttggtatcggtatggcagtagatgcaaacgttatcgtatttgcccgtatccgtgaggaaatcgcaggtggcaaatcagtgcttgctgcagtaaatgagggctacaagaaggctctttcagccatcctcgatggacaggttacaacctttatcgcagcacttgtgcttatggtgctcggttcaggtacagtaaagggctttgcatacacacttatgatttcaattattctgtcactgtttacagctctttttattgcaaaataccttacaagagcattttacggtgtcggtgtcagagctgagaagttctacggcaaggcaaagaagagaaaggttatcagatttgtacagaacagagttaaatactttgttatctcaggtgtagttatacttgcaggtattggcggcatgatttatttcggtgctacaagcggcaatgcattaaactacagtcttgagtttgtaggtggtacatcaaccactgcagactttggcaaggattatacagccgcagaggttgagaaggacatcgtgccttcagtatcaaagctccttggcaatagtgcagtgcaggttactacagttcagggcagccatgatgtcacattaaagacacgtacactttcactcgatgagagacaggatctcgcagctcttcttgagaaggatttcaatgttgatgcatcaactatagagactcagagtatcagctcaacaatcagtggtgagatgagaacaaacgctgtaaaggcagttattatttcatgtattttcatgctgttatatatctggttcagattcaaggacatcagatttgcttcaagtgctatccttgcgctggtacatgatgtgcttgttgtagtcacagcatatgcacttatcagaatctcagtcggcagtacgtttattgcatgtatacttacaatcgtaggttactcagtcaacgatacaatcgttatctttgaccgtatccgtgagaaccttcacggtatcaagaagtactcagcagatgagcttgctgatatagcaaacgagtcccttacacagacactttcacgaagcatcaatacttcgcttactacatttgttatggtattgttactctttatctttggtcatacatcaatcagagagttctcattaccactcatggtaggtgtgctttgcggaacatattcttcaatctgcatcgctacagagctgtggtatgtgatgaagctttatctgggcaagagcgccattaaaaagcaggcggctgcaccggctaaggtttctaaaaaagctaagaattaataattaatttatggcccggcctttaaaggctgggctattgttttttgtggacttattaatatatgcagatatgtttatatatttataaatttatatgcggagtaatagaatggagcattatttatatgaaaatttttctgatttatctgcttcttatgaatatagcaggctttgctgcgatgggaattgacaagtgtaaggccaaggcacacgcatggcgcatccctgagaagacattatttgggctcagcctgctgggcggaagcgccggtacctgggctgggatgtatgccttcaggcacaagacaaagcattggtattttgtaaaggggatgccgcttattttctttatccatgtggttattgcatgtgttgtctacaggaatttctattagaaatttaattatacaaggtaacaaaatacttaatgtaggtaaaaagtaacaaaaaaatatagcatataagtacataattgtgtataatagataacaggtacaaaaccactacacaactatcaaggaggacaaaataatgtgggcatatgaaagcgtattttatcagatttatccgttaggcttctgtggggcaccatttgagaatgatggtgttttggagcacagaattttaaaagtaaatgactggatacctcatatcaaaaagcttggggcagatgcaatctatttttcaccggtgtttgaatctgatacacacggatataatacaagggattatacaaaaatagacacaaggcttggcacaaacgaggacttcgcacaggtctgtgataatctgcacaaggacggcataagggtggtgctggatggtgtgttcaatcatgtgggaagaggtttttgggcgttccaggatgtgcttaaaaacagagaaagctcaccatatgtaaactggtttggccgtatagcctttgacggcaactcaaactataatgatggattgtggtacgagggctgggaaggcaattatgatctggtcaagcttaatctgagaaatgaggatgtaatccagcatatcttttcagcgataaagggctgggtagacgagtttgatatagacgggctgagacttgatgtggcatactgcctcgaccatgatttcctcagaagactaagggagttttgcgactcactaaagccggatttcttcctggtgggagagacactgcatggtgactataaccagattatgaatgatgcgatgcttcactcggtaacgaactatgagtgctataagggtctgtactcgagctttaattccatgaatatgtttgagataaatcattcgcttctcagacagttcggaccggagcagtggactctctacaagggtaagcacctgctgtcatttgtggacaatcatgatgtgacaagagtggcaagcatactgaccaatgaaaagcacctgcctctcatctatgcacttgcatttggtatgccgggcatcccttgtgtgtactatggcagtgagtggggagagaaggcaaaaaaagaagacggtgatccggcgcttagggcatgctttgaagcgccacagtggaatgaactgactgagtggatttcaaagcttacagaggcaaagaagcagtcaaaggcactctgctacggtaatttctattcggttgtgctcacaaacggccagtgcgttttcggtcgtgaatgtgatggcgaaagggtattcgtgtgcatcaatgccgcagaccagccgtttttcgcgggctttgatatgggaaagggtgatgcaacagacctgattacaggtgagcagattacattaaacggtggccttgagctgccaccttacagtgcatactttttgagataacatttgtatggacaataaaggaaaaaataaaagaaaaaatggaagaaaagagctcatatgtgctgtcacagccgtagtggtactttacacagctatggagtcgataggcatcacatgccccattaagttcatcaccggaatatcatgtgcaggctgtggtatgtcgagggcatggatggcatttttacagcttgatatagcaaaggcatttgcataccatccgcttttttggcttgtgcctattgcggtaatagtgcttttgtgtaaatctaaaataaatattaaaatttataaaataattatatttacaatcatcattatgtttgctattgtttatatatgcagattgatatggtcaggagatgatgtcgtggtctttgagccggaaaagaatatcctgtttcgtatcattcgtgtaataaaaagcaaataaaaaaggagaaagaagatgttttgtgagaaatgtggaaaagaaattcctgattcaacaaaattctgtccatactgtggagcagctgtttccaaggcacaggattttgtcaacaaagcaggagaggtcttcaatgcagcagagcaggagcttggaagtgcatttgatgaggtaaagcagtccttcacaggaaacagtgcaaaccagcagaatgcaggtggacagtacaatggaggctaccagaacaacggagccggacagtacaacgcaggctaccagaatagcggagccggacagtacaacgcaggctatcagaacaacggagccggacagtacaatacaggctaccagaacaatggtggtcagactcctccgccatacaggggagagaagttaaaggatgacagaggtcttgcctcatacatcatcctgtctattattacatgtggtatttatggatattatttcatctacaagatggctcatgatgtcaatatagcatgtgatggagatggcgagaatacatcaggtctcgtagcatttatcctgctttcaatgattacatgcggtatctatgcatggtactggtactacaagctgggcaacagactggcaaataatgcaggcagatacggacttgtcattcaggagaatggaaccactgttttgatgtggtgcatatttggtacacttatctgtggaatcggaccattcatcgctatgtatatccttatcaagaactcaaatatgatctgcaatgcttacaacaggacacatggatttatgtaatttgagttttgatttaatttaattaaataatttgattatattatttctaaggcgggaggcagtttgcattaagcagactgtctccttaaattttgtatattaaattaaacggtaaatattattgaaaaaggtcattcagacattgacaaaaatttgtcaaagtgttactatttttttataaattacgacagaaatgtcggttatacataggttttttaaggaggatttatacaatgagcgagttcaaaaatttaacacttgacgtagcagatcagattgcagtacttgcaatttcaagaccggctgctcttaatgcattaaacagtgagactcttgatgagttaaatgtagcattaacagagatagaggcaagagacgatgttaaggtgcttatccttacaggtggtcctgacaagaagggcaacgagttcaagtcattcgtagcaggagcagacatctcagagatggttaatttcacagcaccacaggcaagagcattcggaatcaaggcttcagagccattcttcaagctcatgaatatgcgtcaggtaacaatcgcagctgtcaatggattcgcactcggtggaggatgcgagatttctatggcatgtgatatcagaatcgcttctgagaacgcaattttcggacagcctgagacaggacttggaatcatccctggctttggcggtacacagagacttgctcgtttagtaggaatgggacgtgctaaggaaatgatcttcacatgcgacaatgtagacgcagcagaagcataccgcatcggtctcgttaataaggtagtagcaaaagaggagcttatgccaacagctaaggctatggctgcaaagatcatctctaagggaagctatgcaatcgcagttgcaaaggctgctatcaacaacggatatgatatggatatcaagaacgctgttgagatggaagcaaacctctttggtgttgtaaatgatacaaatgacaagaaagagggaatgggagcattccttgagaagagagctgcaaacctcacagatttctaaattatgatttgaattatttattgtatatgaattaaaatagccggtgtgttaagcaccggctattttgtatgaatcagattagattattactctcacgataaacatagtatcagatacactgtactggcatttgccgcccagtctctcagcagtctgtctgatgctttttgtaccaagcccatgccctctttctgttgcaacgggcatatcgtttatgagctaaggccttgtcgttttcattgttttcgatgaaggcagctatattattcagaaagtgcctcatatcgtgacgcagcagagaaacattttttaccacttaagtcattttgactttattatataatcttttttgtaaagcgtaaacaacagtcttgaaaaaagaacgaaacgtatctataattagagtactgttcacatggcagtgttaatatataattatagatttacaagaggaaaaaatgaagtcaagagcaacacagaccaaagaactggatatggtgaacggaccactcgcaaggaagatactgatttactccataccgctcatgttctcaaacctgcttcaggtatttttcaatatgacggatgtggcagtggtgggaaaatttgcaggtgcaagagcactcggctcggtcggttccacgacaatcatcatcacactcacaacaggcatactgcttggcatgggaggcggtgtcaatgctgtcacggcactgcacatgggagcagaggactatcagagggtgcataagaccgtccacacatcggtcatcctgtgctttatagcgggacttttactgttagtggcaggcctggctttttcaaagccactgcttgaagtgatgaatacaaagcctgagcttatagacggtgctacagcatatctgatgatatatctgtgcggttcgccggcgcttgcgctttataatttcggcaacggtgtgctgagcgcagtgggagatacaaagagacctctcatatacctgagtatctcaggaattatcaatatagtgctcaacctgttctttgtaatagtatgcagactgggagtgataggagtagccatcgcaagcatcatagcacagtacatctcagcggcactcattatcaggtttctcatgaagacatacggcagctacggcctgcgcatgaaggatatagggattgacagggatgcggccgcagcagtgcttcgtatcggagtgccggctgcgatacagtactcgctctttgccatagccaatatatgtatccagacatccatcaactccttcagccatgtggtcgtggagggcaattcagccgccaccaatgcggattcgctcatctatgacatgatggcagcattttacactgcatgtaccagcttcatagcgcagaatctgggcgcgaggaaaaaggaaagggtgcttaggacatttttcatcaccctggcatactcgtttttgatgggactggtgcttggagtggcattgtttatattccaaagaccgttccttttgctctttacgagtgatgatgccgtgatacactatggacagatcagaatcggtgtgatggcattcgtctactgtgtatcagccttcatggacaatgccacagccgccgccaggggcatcggaaaaagtgtagcacctaccatcatagtggttatgggctctgtcgtattcaggattatatggctgctcacggtgtttgcgtattttaagacactgcagtccttatatctcatatacgtcatttcgtggacgctcaccgcaatcgccggcaatatatactttgcgtaccactataggagaatttagcggacagctacaataaaactgaatagtaagcgataaaaaacagtcagacatatgtgagagatgtgcccggctgtttttgcggtttcgcggctgtctctcttttataataggataataggaatttgcctgatatttttattgcccttttgcggttttaatgctacaatcaagccaaagcattatatttctgttgagcgacaccacagtacacattttcatcggtgcgtatcactttgaagagggtagaaccacttagtatttttcgacaaagacatggaaattttcaatgctttaagttacctatcaatagcagggaaaatggatatgtcgattgagaaacattatgtgaatgaagctgactggggttgttgatgctttatattgacaagaaattttgtatcatgcgatattctattcttcttgcttacacaactaaacaggaggagaataatgtcgggagagacaaaagaggtttttggcagtaattatggccagaacgatgtaatcatcaacggattgattgaaaaaatgacgctgtttgatgacaatctgatgagtcttgtattcgggcagaatatcgagacaacggagttactgcttcgcgtaataatggagcgtgatattaaggttatagacgtccgggggcaggatgaattaaaaaatccagtgattggtgggagatgtattaccttggatgtgcatgcaatagatgtcgatggcagacatattgatatcgaggtgcagattaatgctgagggatcgcatgtcaaaagagccagatatcacagcagtatgatggatgcgaggatgctggaggaaggacaggagtttaaggagattaaggattcatacgtgatttttatttatgatcacgataagttcagaaaaggactgccattttatcacattcaaaggcgtgttgatgaaacgggtgaagcctttggagatggttcgcatattatctatgtaaatggaaggtatgaaggtaatgatgatataggtcggatgatgagagattttcatcagtgcaggccggagctgataaaaagtgagacattgtcaaaagcggtggcttattacaaagaaaaggaaggacgtggtgctatgagtgaagctgtaagaaagtacgcaatggaatatgcaaaagaatatgcaaaagagtatgcaaaagagtatggtgaggaacaaagaagagaaggtatgaaggctggaattaagactggcattgagactggaattgagactggcattcagaccggacgtcgtacagaaatattcttatcggttcaggatggggactattcggtgaacaggggagctgagaagcttggaatgtcagtggatgagtttgagaaatcaatgagtgaggcaggctacagagtgccggagttagtgtaacacgtatatatacaattaaaatcgaggcatgtttaattatggaaaattcaaacgaaaaagaagacatgagagcacttattatggtatttgtaatatggcttttgttatggtgtgttgataatagacagtatttttttgagtatctgccgcatcactcagattatgagatagtggcagcatataaagcttttaatggtgatatgcgtgataatataatcagggtatatgtaccggatagggataatgctatcggatatataaaggcagactacacagacaaagaggaaaagcctatatatgtaggatacagtaaggaaaggtcacctcacgttgtacgtaaaacaccggcgctttcaaaaggaatgattttagcgggaggaatcattccggcagcaatagtccaatatttttttagaaaaaagcataaatagtgtccttagacacgcaggaaatttagagacccttcaggattgtcagtgcccttctcaagcagcgagatgagctctgagatagtctgttcggtctcttcttttgtggacggaatcagtgtattgtcaagcttcacgacgagcacgagaagcacaatctctgcaagcgcatcaggctgttggcacacgataagtccctcagctgctccctgccttatgatttcaccggtcaccggctttagctcggtaatcaggtaattgatgtatttgttgtgcaaaaatgcattctcctgtacaccatttccggcatcggactggatttttaaaaaggcggcagaggagttgcggcatgcctgaaatatcatcgccatgcgcacaaacggagatatatcggtgcgctttgcaagctcctttgcggtggcaagcggctcttcgtagctttttgccataagtgcatcaaagatagcctcctttgatgaaaaataataatatatgctacccttgcctatcccggctgtctgggcgatttcgctgacagatatctgggatattttttttgtttctaaaagggttcttagcgcttcaagtatcttctcgtatttttccgaatttggtcttgtggaatgtggcatagtggatcctcttatattagttacgtttattttaatatatattatcacaatccatatgattcttccatgagattttaccgggggaataggttttggtaaaaatgatatgatacgtttggatagtttatgaaaaaataacagaatagtttgaaaatgaaaatatttatattgaccgacggtcgaaaaagtgatactgtaatgaagtaacaagttgaccggtggtcgaaaaggagaattgatatgacttatgcagatatgttttcaaaggtaaagggactgtttatggagtctgatgtgagcgatataagcgagcaccttgcttttcagttcaatataacaggagaggcagagggaattttctatgccgaggtaaaggatggtgtgctggcagtggagccgtatgagtattttgacagggatgcgatttttatatgcagcgctgagactctttttaagctggcagaaggaaggcttgatccgagtcttgcatttacaacaggcaagctcaaggtggagggaaatattgataaggcacttcgcctgaagcagattatagacagtaagaaggcgtaggtgatgaagatgaagtggggaataattgcaggtgttttaggtggtattgctgcagcagaggcaggcggcagtgcttatttctacaggaggaccatgatgcgctacaatgccaagaaggagcgcacgatgaagatgtccggggttgactgggagagctattacagctttatgaagccacgcggagagtggatgagagcacagactcatgaggatgtgtggattaggtccgatgatggattaagactgcatgccacatattttccggggatagatggaggtaatccggataaagccgtcatatgctttcacggctacacaagtgaagctatgtctgattacagcagcatatccaattactatttaaagaagggctatagcatgctgcttgtagatgcgagggcacatggacaaagcgagggtaaattcataggcttcggctgcaaggaccgctatgatgcgcttaagtggattgactggatgattaagaaggcaggcaatggcataaggattgttttgatgggaaattccatgggaggtgccactgtgcttatggcaagtggacttaatctgccggagcaggtgaagggaattgtgtcagactgtgcatttacctcgcctaaggcggtatttacacatgtgcttcacagcatgtaccatctgccggcttttccgatgattcagattgcagattttgtgaacagaaaaatggcagggtatgggcttgatgaatgcaatgctgcaaaagaggtgcaaaaggcgaagctgcctattttgtttatccatggtgataaggatacatttgtgccatgtagcatgtgtgatgagctttatgcaagctgcgcgtcacaaaagacaaagctgatagtaaagggtgcaggacactgcgagagctattacaagaatacgaaagctttcgaggacgcacttgataaatttttggaaggagttatgagatgatgaagacgagaaagggacacaacgtatatccgattacggttgcacaaaaatttcatttgtactatgcaaagtactgtccgaatatggcagtactcaatataggtacaagcctgacaatcggcacggagcttgactggaacgtgctaagggattcaatcaactacgcgtatgccagaaacgaggccatgcgtatccgctttacaagggataaggatggagagtgctatcagtatattgcggatgtggatgaggattttaaagagagaactgtcgatttcaaggattttacggatgtaaccatggaggaggcagagaatgagatgcaaggctggacacaggtgccgtttgagtttgaggactctcctatgaccaaaatcgtgatgataaagatgccggatggattcaatggagtgtacttcttaggtcatcacatggtggttgatgcgcagtcacttattgcatttttaaaggatattattgagatatactgtaatgccatgtatgagggagtaccttttccaaaggatatgtgctcatatatcgagcagcttaaaaaggatctggcatatgaagccggaagtaaggcacagcttagggacagagagttctttgagaagcttatcagacagtcggagccaatctacaacggaatcgacggcacagcaaagcttgatgcggcaagagaactgatgcatgataacaagctaaggagtgcattcaatgcatcggatgatgtcacctcagcgcttgatatctttcatctggaggctgagccgacaaagcgtcttatggatttttgtgagaaatatcatgtttcgcttgcatgtctgcttctcatgggaatcaggacgtttttccaaaaggaaaacggcttcgatgatgtctccgtaaataatgccatcgccagacgtgcgacactcaaggagaagaggtcaggcggcacacgtattcattcgtttccgtttaggacgagcttttcaaaggatgtacgctttatcgatgccgtgtataccatcagggataagcaaaacgagctgttccgccatgcaaactacaatccgacagagtactttgcactgcgctcaaagacgtatccgcagccaaaggcggggcttacatatgagccgatgtcgcttacatatcagcctatgaccttaaaggaaaagggcttaaaagacctcggagatataaaatacaagactaagtggtacccgaacggcatgactacacaggctatgtatctaacggtaatgcatcgcccggaggacaacggactggatttcagcttcgagcatcaggtcaaggcagtctcaagaaagcagcttgagtatatgtactactatctgtgcaaaatcatgttcaagggtgcagaaaaccctgagcttacaataggcgaaatcattaaattagtgtagtggattaggaaacgtattaggtaaaaggagattattatgtttgatgaattagtggaaattatctgtaattatgttgatgttcagccggcagatgtgcacgaagaatcacgttttatggaggatctgggctttacgtcatttgatttcatgagcatgctcggggagatcgaggatacctttgatgtggagattgatcagacaaaggctgcagaaatccgcacagtacaggaagctatcgattatcttgagacattaaaagacgcataatcggcgcagataggagaaaatatgttatttcacacaattcctgaaattctttcatatgcaaagaagacttacggtgcggatgacgcgataagatggaagaaatcaaaaaatgagatagagtcaagaacctacagtgaacttaagaatgatatagacagctttgccaatgccatcgaaaagcttggcaaaaaaggacagcatatcgctgtaataggcccttcatcatataagtggatagtatcctatctggcaatcacagaaagcggaagtgttgcggttccaatcgatgcatcgcttccggcagcggatatatgtgagcttttggacagagccgatgtgaggatgcttatatttgatgaggcacgttcggatgtggctgaggctgcagctaaaagctgtcatgatataaatgtgtatgtgtctatgaacagtacagagcattgtccacaggtgctttcgtttaatgggcttatagatgacaacaggggaagctacgagccggcagtggcagaggatgcgctttgcactatcatgtttacgtccggaaccacaggaaagagcaagggagtaatgctgacgcataacaatctggctgaaaatgccacatgccttgacatgaaaattggacctcacacggtaattttgtctgtgcttccgatacaccatgcatactgtctgagcatggatattctgaaaggaatttcactgggttcggtaatctgcatcaatgattccatcatgcgcatggcaaaaaatatacagctttttactcccgacatgattcttatggtgcctcttatgattgagacatttgccagaaagctcgaggaggtaagggcagcaggacttcctgcagagccggtccgtaagaaaatgtttggagagaggcttcatacaatctgcagtggcggtgcgtacctaaatcctgattatgttgatttatttgcagagtttggtatcaccatattgcagggctatggcatgacggagtgttctccggtcataagcacaaatctaagctgggatatccgtaaaaactcggtaggcaagctgatgccaaactgtgaggcaaaaacagttgacggtgagctttttgtccgcggtacaagtgtgatgcagggctattataagatgccaaaggagactgaggagacactgtcggacggctggcttcacacgggtgacttaggctatgtggacgaggatggatatatttatctgaccggcagaagaaagaatctgattatcaccaaaaacggtgagaatgtgtcaccggaggagcttgaaaacgctctgagcgtaaatcatctcataaaggaaatcatagtgcgtgagtctgaaggcgtgatagaagctgagattttcccggacagcgagtatgctcaaaatgcaggtattgccgatataaggccggctctgcaggagcttatcgatgagtacaatgtgaatgcacctgagtacaagcgtatctatagccttaaagtgagggagagtgagtttgaaaagacggcttcacgtaagataaagagaagctgatatataaagaggaagccgatgcatgtggcttgcatcggctatatatgaaaaagattagtatgagtattgcgtaattaatatgttttgttgcttttattttgtatctttcgtttatgatgttagtatacaaatcaattgtgaaaaccgtgtgttttgaatttcacttttctgtaaacaaaatatgaacaaactgtgcagtcctaaggtaccataaaaaatccttagacaatatcatgattttgtgtataattatagtatcggtatttgttattgcatataggataaaattttatgcataatcaaacagcgatattatttttttacaaggggaaaaagatgaaattattaagttttgcaatcccatgttacaattcaaaggattacatggagcattgtatagagtctatcctgccgggtggagatgatgtggagataattattgttgatgacggttcaaaggatgagacagcagcgatagctgacagatatgcagccgaatatcctgacatagtaaaggctgtacaccaggagaacggtggacatggagaggctgtaaacacaggtctcaaaaatgccacaggcaaatatttcaaggtcgttgacagcgatgactgggtggatttggattcatacaagaagatactggacaagctaagggagtttgagcaggagaatacacagattgatatgcttcttgccaactatgtctacgagaaagagggagcaaagcgtaaaaaggttatgcgtcagaccggctttccgcgcaatgagatatttacctggagtgatataaagcatatttataaggggcattacatactgatgcattcggtaatatacaggacagagcttttgagaagctgtggactcaagctgccaaagcataccttttatgtggataatatctatgtatataagccgcttccgtatgtgcgtacgatgtactatctggatgtggacttctacagatattttatcggtcgcgatgaccagtcggtcaatgagcaggtgatgatacgccgtattgaccagcagattcgtgtaaataagattatgtttgacgatgtcaaattgcatgagataacaaatgagatgtgcaggaagtatatgtacagctatctggagatcattacgactatttctactattctggcaattatctcaggcaccgatgagaacatggctaagaaggatgaactgtgggcatacatgaaggagcacgatgaagaaacctacaagaagctgcgccatggcgtcatgggacagttaacgaacctgccgggcaagggaggcagaaaggtagctatcggtgcgtataagctgtcgcagaaggttgttggattcaattagacggatgtgaaataagtattattcagatgaggtattatcatcaattaattaaaaaagaccacagggcatcaaaacagatgaactgtggtcttttaactttaaattaaattattctccaagtgtgagcatggtatctatgcaggccttggcctttgttcttatatcgtcaggcagtatgatttcttctccgcctgctcccttaacacaattgtatacatccataagggtagtgagcttcatattgtggcatacgcagtcctttgagagcggatagaagctcttttcagggcactcatactgtaagtgctgcagtatgctgttttcagttccgatgataaattccctgtctgtgctgtttttagcatagtcaatgatgccggtggtgcttccgatatagtcagcagcctttgaaacctcagcaagacactccggatgtacgagaagctttgcagcaggatgagccgcttttgctctctcaacatctgctattgacatgcgcaggtgagtaggacagccaccatgtacaaatttgaaggtcttttccggaacctgttcctcaacccatgcgcccagattgcagtcagggatgaaaagaatcttgttattgtcaatatttttaacaatttttacagcggatgaagatgtgacgcacacatcgcatatggttttaagctctgatgtggtgtttatgtaggcaaccactgtatagtcagggttctcggcctttaacgattgtaagagctctacatcgagctgctccgccataggacagccggctgcgctgtttgacaaaaatacatgcttgtcaggagataaaatcttgcaggtctcagccatgaagcggacaccgcacatgagcacattcttctgtggtgctgtggcagcctgcttgctgagtccatatgagtcgcctgtgaagtcggcaacctcaagtatctcgtgactctgataagcgtgagctaatatacagatatcattttccttctttaatcggataatctcatcctgtaattctcttgttgtcatcataatatgatatacctcttgaaattcctagtgtgattgaagcacagttgtatcaatgtaagcccattttggattttacataaagaaccggccaaaataaataagttacttgtcattatacttagctgtaaaccagctgtcaacacaaaagttttacaggtgtcttgtcagttataaattttagtgttataatacgcccattacagtaaatcgcatccagggggatgttgctaaagaagcggctacatcggtggatgcaggtaaataaaagaggtaacatattatgaatacagatgtacttattgtgggaagcggctgctcaggtctttattgtgcgcttaagcttccaagagacataagaattacactgataacaaagtcagatctggagagcaatgattcatttctggcgcagggcggcatgtgcatgcttaaagagcagtctgatttcgacagcttttttgaggataccttaaaggccggccactacgagaatgacaaggagtcggttgggataatgataaactcatcacctgaggtggtgaaggatcttgtttcatacggagcagattttgcgagaaatgatgacggctcacttgcctatacgagagagggagctcattcacacaacagaattattttccatgaagacgtgaccggaaaagagataacaagcacattgcttgcacaggttaagaagctttcaaatgtgacactcatggagtatacgacgatggttgacatcatcgaaagggataacaaatgctacggcgccatcataagaaaacaggatggcacgctggaaaaggtgacagcggcatacactgtcatggcttgtggcggagttggaggactgtacagattttcaacaaatttcagacatctgacaggtgactcgcttgccattgcaaaaaagcatggcatagagcttaaaaacccagactatgtgcagattcacccaacgactttttacacgaaaaagcatgaggacagaagctttctcatttcagagtccgtaagaggcgagggtgctaagcttttagacaagaatatgaacaggtttgtcgatgagctcttaccaagagacgtgctgaccggcaaaatccgtgagcagatgaaaaaggacggcacagactttgtctgggaggatttgcgtaccattccaagggatgagcttgtatcacattttccaaatatcattgaacattgcaaggatatgggatatgatgtcttcaaggagcctattcctgtagttccggcacagcactatttcatgggcggcgtcaaggtgaatcaccacagccgcacatccatggaaagtctctatgcagttggagagaccgcttgcaacggagtgcacggaagaaaccgtcttgcaagcaattcactgcttgagagcctggtattcgcaaagcgtgcagcaggacagatggctgagcttggctttgtaaatgatgagatagcagccaaaaaggccgcagatagcatcgacctcgcagactacagcgatgaaaaagctgtagagagagaatacaggaagctcgccatggaggctatagagggacgcaccggcgcacaagacatgaatgccgaatcaggtgtcacctacattcaggcataaaagcaagtttcagggccatacgagcgtcatcaaaaatattggtagaatacagtccatgcccagtagaggcaattttaagtgcggtaatagctgtagtaaccaggtttcgcactcaaaaaactaggaagccggagagtacacagtgtgttccgaagaaaaatatgaactgccacggggttccattaacgcagttaatgcgaacaagtggcaaattataaagcgctatccaaaaaaaatcccgtggctgacttcatatttttctgaggaatatactgcgtactaccccggcaccgcacagcataaaaagtgcgaaaccgtaataaataagaataatttgaacgaaaggaatctaactatatgtacgatcaggtaacactgggcctcaacgtagacccattcatattaagcgcattaaaggaggacatcacaagcgaggacgtatccacaaacagcgtgatgccacatccacaggcaggagaggtggatttaatctgcaaacaggacggaatcatctgtggactgcaggtttttgagagagttttcacactgcttgatgcagatacaaaggtagagttttatgtaaaggatggcgatagggtagaaaataagcagcttatcggcaaggtttacggagatatcagagtactcttgtgcggtgagagaactgcgctcaattatttacagcgcatgagtggaattgccacatataccagtcaggttgcagcactcttagagggcaccggtatcaagcttttggataccagaaagacaactccaaacaatagaatttttgaaaaatactcggtcagagtcggtggtggaaacaaccacagatacaatctctcggatggagtgcttcttaaggataaccacatcggagcagctggcggtgtaaaagaggcaatcgccatggcaaaggcctatgctccgtttgtcagaaagattgaggttgaggtagagagctttgatatggtgaaggatgcggttgaagccggtgccgacattatcatgctcgacaacatgtccacagagcttttaaagcagtgcatcgactacattgacggcagagccgaaatcgaggtttcgggaaatgttaccaaagaaaatattgcaagaataaagggtcttggtgtagactatgtatcaagtggtgcgctcacacattcagcgcctattatggatttatcacttaaaaatctacatgcagtatagattttatattgccggtcgcactatgctgtgacagtaatgttttacagaaaggaacgaaaatgaacggtgatgagagaagaaaaaaaataataaatattctatcctcgtcaaagtcgcctgtggcgggagttgcgcttgcaaaggagcttgatgtgagtcgtcaggtgattgtgcaggacatagcactgcttcgagcaaacggagccgcgattttttcgacaaacagaggatatctgatacaggcggataagcagtattcgagagtattaaaggtggttcacgaggatgatgaagtagaggaggagctttcaacaatagttgatgccggaggccatgtgaaggacgtatttgtataccacaaggtctacggagtgatccgcgctaatatggacatcaagtccagacgtgatgtcagaaattacctggaggaaatccgcacaggaaagtccagccttcttaaaaatgtaacttcaggttatcactatcacacaatatgtgcggagagtgaagaggtgcttgatgccatacaggaggagcttaagcagaagggcttccttgcaaagctgcaggactatgagccggtggatttctggggagacaacgaggacgaggcaaaggcttaattttatcgtaaagttaaagcgtaatataataattgcccgggtgaaagcccgggctgttttttgctttttatttaatttccagattttcacctgtaagccctatgtatgatccctcaggaagtccaccttcaggatgtccgataagccatttgtttttagctgcaagaagagcatcttctccgccggtgtgtggatgttccagggcttcatttgtgccttttggaagtacaacggctaccagaaatccgccagcagatgcattacatggtgcgtagtgcagtgttgtggcataaagctcgactgctgttccggaaggaatcctgaaagcttccatcaaagaggtatcatatgtattttccacagagatatcctgctgtcggccgagtatcagtatggcatcagttgcggcaatattgacctcagagcatctgtgatactcaacagcattgagcttatgattgttgcctatgcaccagcctatctgtataggaagctccccgtatgttttctgttgtaattctgtagcgcattttagcttttcaagtgcagaaatggatggctcataaaccacatcagcaggaatttctactgtctgcattgtgctgaccagctctgtaagatctatagagtcgatcacctttccatatttcttaaaacattcttctgttatttcatgtatgatcattatatggtcctcctgatttttaaaattatagaaattataatgtatgacagagaaaatgtcagcaggataaattattgttttataccctagttattagatatatttattttaggatttgtaaaaatattttttatggaatataatgactattatgcaattttatagcagagactgaacaaaagaaaatagggagaaaacatggtatgaaaaaaagattggtttccgcagcggttacagtggcattgtttatcggacttatagccggtgttacttttcaatcgtcagataaaaaagaaataaagcattttacggcttttttttctgtagaaggagataatatagatccggataatgatataaagcagctcatagcagagcagattggtgctgaatgtgaggaaacctggcttgttggacaggataaggacgatgcaataaattctctcatagcaaccggggaatatccggattttgtattgggtgagactgcgctgtatgaggcagatgcactcattccaatagatgaatactgggacgattatccgaacataaaagaatatctcagtgatgaacaatgggaaaagttaagacagccggatggacacatatattggattccaccgtttggaatatcacatggggatgatgtggagatgctgcataatggtgaagccttctggattcagacaagagtattaaaatgggctggatatccaaagattacaacgatagagcagtactttgacctgatagaaagctatgtacaggcaaatccaacaatgccggatggaacagaaaatataccatttacgatgctttgtgatgactggcggtatttttgccttgaaaatgtgccgcagtttctggacggatttccaaacgatggaagctgtatggtagacacggaaaccaaaaaagtgatggattacaatgtgaccgacacagccaaaagatatttcggaaagcttaacgaagagttccgtaagggaataatggatcccggggtgtttaatgccacctatgatcaatatttggataagctgtcaacaggagctgtgcttgggatggtcgaccagtggtggcagttttattatgtaatagatcctgtattcaaaaaacagaatctggcacagcttgggtgtgattatgtccctcttcctgtcacgattgatgatggtattcacaacagatggcatacaaacaggatggcagaaatagattattcttcaggagtgtccattaccacttcctgtaaagatatcgaaggtgcgatgaagtttgtcagtgatctcctggaatctgatatcataagagaaaggttctggggagaggagggcaaggactattcagtcgatgaaaacggtttgttttaccttaccaatgagcaggcagagaaaaaaagtgacagctcatataaggcagcgcatatgtgttcgtactcatactttccaagagtggagggaatgcttgatgatggtataaatgcgttttcaacggagtttcagcagaacgagtttttcagaaatcagcctgtggatattcaggaatgttttgaagcctatggagtggaaaactatgtagatctgcttggaaaaaatgatgctccaggctcgtggtatccgatgtattcatattcagattcaattccttcgacctctgaatgtgggaaagtaaagaataatattgtggcagtaaagaaaatatggctgccgcaggttatcatggcagatgattttgatgctgcctggaatcagtatatggatgagtacaatgcctgtaatccacagatatattttgattatttacagcaaaaggtaaatgaaaattagcaatatttgaatactgtttggcaatttattaatagaataacgagcccttgttcgtttacacttgtatatatcaataaacgaatgggggggattattttggatgatttaaaaaacggtgctttgtatataggcacgataccatcatcaatggacaataacagatgctcggtcacacttgaggatgatggaagcgttaccttttatatctatgcgccaaatgccaataaagtagaagtagccggaatgggaggctatttcagctcagaacgcatacagttaaagcctgatatgcagggtggattttcggcaaacattaaagatttccattgggcaatgcattattatttctggtatgtagatgatgtctgcataacaaatcctcatgcggctatatcatatggctgttttgctgcaataaacacatttgaagtgccaaaagagggcgaggatttctattttgtcagggatgtgccgcatggaacggtaagtctgtgcaaatatacctcacaggtaaacggtcacataaaggagagctatgtgtatactccccctggatatgagagcggagatggaaggtatcctgtattgtatttacagcatggtgtcggggagaatgagaccggatgggtatggcagggtaagatgaatttcatcatggacaatctgatagcagacaaaaaatgtgtgccgatgatcatagttgcaagcagtggctactcatttaaggataacgaataccctgtattttttccgggagattttgacagtgagcttgtaaatagcataatcccttatatagaggaaaattttaaggtcaaaaaaggaagaaacaaccgtgctgtggcaggactttcacttggttcagcacaggctacggatatagcggcaagacacccagagcttttttcagcagttggggtattttcaggtgttgcaatacatctcatgaaaaaaatcattgacagcccatatcggtttgaagctgtctttatgtcggcaggagatgaagaaaaagagatactgcttggaatcaatgagatggtaaaggaattttcacggcaggggaaagacagtacaccaaaagtatatgagggctatcatgaatggcatgtatggagaaagagctttaaggatttcgcacagatgctttttacatgggatgacgcagaacttgatgatattaataaagctgtcccggtcagatcaaagaatattgattctaccacaccggtacaggcggatgagagcatggtattttttgatccggtgtacaggcagatacagttcgaaaatgacgaggatggaaaaccggctggcaaatatccggatgtcatacatggtatccgtgtgacggaggataacagcattgaagtaaatctttttgcacctgatgcaaaaagcgtgagcgtagttcttgaaaatggcacggaggagcttctttacagatcaaagaaaaatgatggttactgggaaaaaacaataggcaatccggctgagggatttaactatgtgacatttatggtaaatggaacacctgtagtaaaccctgcggcacctgtcgggttcggatataacagggctgtaaactttgctgaggtacctgagaggaactttagctggcatgagcttaagaaaacagatcatggtcagatacatatccattattcgtgtgatggagacggacaggtcagtatgaattatgtttatacaccagccggttatggagaggataactgtgacaccggaagagtatgtgtgcttgagtgtgctgcggacgaaagaaatttttgctggatacatcagggaaagatagcaaatatcatggataatctgtctggcgaaggcaggataaaaggaattatgataataatggcagacagcacgatatctgatgatataatcgggaacataacagccatatacggaattaaggacagtgcacagaaggaatggttcaaaaaaggagataatgaatcctggacatcatgcagacacagatttgtaaatttaatgtgcgggatacagtaaaacagagacaaaaaggagagaaaaatggcaggagcatataagacaggcaaatacagaaatatattcaaagagtatgggtatccggaagaagaaattcaaaaaagagtagaggatacttttaacacgatattctatgggaatgatgatgaacgtttttatcatgaagccggtgatgatatgggatatatggaggataccggcaatcatgatgtgagaaccgagggaatgtcatatggcatgatggtatgtgtacagctggataaaaaagcagagtttgacagactgtggaaatgggtgcgcacatatatgtacatagaagatggtccggcaaaaaattattttgcgtggtcatgtcagacaaacggaaagcgaaatgccgaaggaccggcacctgatggtgaagagtattttgcaatggcattgtttttcgcctctaaaagatggggagatggcgatggtatattctgctacagcaaagaggcacaaaatatcttaagggagtgtgtacacaagggtgagccgggacacagcggagagccaatgtgggagccttccaacaagctgataaagtttgtcacaaatatggatttcagtgatccttcataccatctgccgcatttttatgaactttttgccgaaagggcttatgaggaggaccgagaattctggaaagaagcagcagctgccagcagagcatatctgcacagtgcatgccatgaaaagacaggacttagcgcagaatatgcagattatgacggaaagcctcatacggggcataaggaaatatttggaagacatgactggtattacagtgatgcataccgcacgatcgccaatatagcgatggatcatctgtggtttgatgcagatccgtggcagattaaaacggcagaaaggcttcagaagttttattgtgaggatcagaaggacaattgggatggtgtatttcttatagatggtacaccgcttgatgagaaggcacttcatccggtagcaatcattgctgttaatgcagaagcttcactcgcagcagatggaaaatatgcaaagcagtgtgttgaaaagttctggaacactccgcttaggacaggtgacaggagatactatgataatttcctttacatgtttgcaatgttagcactttcaggaaattacaggatttattgatttttatatacaatggatctggtaccgcagacttactattatttgaatttatttatcgcacatataatttgacttgttatattctataatttgtcccatattttaaaacctctcttatggtagagtgtttttggaattacaaatacacatgtaaggaggacatggggttgaaaaggaaaaaactattgaaacaaggagcatgtattgcggtatgcagtactatgcttgccacaggtgtcacacagcttatacctgcgtatcaggcgcagtcgttagtattcgctgatgaagttcagcagaatataaagaaaacgacatacacagctgataaattgacagtagactggggaaatgccggctatgagctgacagatggtgtgtggaaagtgacatttaacaatcagtacgatcaggttaaatggagactgccggagactgttgatatgtcaactgtaaaatctgtgacctttaatgtgaaggatcagaaaggatcagtttcactaaaggtctacaagaatggagatgaagatgctgatggcgcaaatacgaagtatgaacttacaggcgcagatgaatactcgataagcccgacaggtgaaggtgatatggtagcagttggtcttatgactactgataatgccggttcgggatcagctatcagcctcgttagtgtgacagtggaaactgatacaacaccaaagacaccacctgagatagagcagaatattgaggactggaaaaaatctgtcacaagcagtgatgctcttggagaaaatgcaatcgcaggaacaggtatcatgttagatgagattaaggacaatacgctcatggaccttgtggagaagcattttaatgcagttacatttggaaatgaattaaaaccggatgcactttttaattatcagcttgagaagtcggttaaaacaaaaacagttcagtttgatgggcaggatcttgaagtaccgatggtaaatgacgcaggggacagccttgatttctcaagagctgatgcgatggtagataagattttggagtggaatgcggcacatcctgacaggaagatacgcataagaggtcatgttctcgtatggcattcgcagactccggaatggttcttccatgagaattatgatatcagtaagccatatgtagataaagagactatgaaccgcagacttgagtggtatatctcaagtgtattcgaccactacttcggagaggcagcaaataaaaagtacgacggacttttctatggctgggatgtagtaaatgaggccgttatcggcaatacataccgtacagatacggtaagcccggcagaaagccttgatgagatacgtcatgggaacaattcgagctggtggcatgtatacaagagcaatgagttcataatcaatgcatttaagtatgcgaataaatatgcgcctagtgatgtagaactttactacaatgatttcggagagacagacaatatcaagtcagaaggaatcataaagctcataagtgatgtaaaatcagcacagggaacacgacttgatgcatttggtatgcaggcacattacagtgtggacagcttctcagcagcacagtttaagacagtagcaaaaaaatatgccgaagcagcaggaaaggttcagcttacagagctggatttccaggcaagcgcagcttacaaatcaggagcagcatcaaaagagagcgagtatacaaagatggcatactgtcacaaacagctttttgatgctgcaaaggacttaaagaaaaacggtacaaatgtagcaggaatcactgtgtggggagttattgagccaaattcatggcttcattcacagtcaaatgttggtggcggagctgacggatcaaagcagtgcccactgctttttgatggaaaatacaaggcaaagcctgcatactgggcttatgtagatgctacaaagcttgagccgttaatacaggatatcgttgtagctgagcagaaaggtgatacaatgtccggaacagaatacagtttttcggatgatgatacacaggcagcttttattccaacatgggataaggatggattaaatgtacttgtaagcgtaaaggatgccacaataaatgatacggatgaagttacagtatatgtggatgagacaaactcagcaggagatgtgacaccggtaaagaagacagttaagcgttctgaggcacaggctgttgatggtggataccgtgcgaccatcaaagtacctatgactgatttaaaagttgcaaagactatcggcatggatgtaaaagttatgaataacgataaagctgtaagcttcaatgaccttaaagaaatgcaggagacaagcagcaaatattatgcaaaggctactctcaagccgggcattgaaaaagcaacaaaagcaacggtaaagattgacggagaagccgacagcgaatgggataaggctgtggctattcctcttacaataaaccttggagctaaggtaacagcagatgccaaggtgttgtgggatgacgaaaacctttatgtatatgcaacagttaaagatccggtgcttaataaagacggtggagaggcatatcagcaggattcactcgaggtatttatcgatgagaataatgccaagacagagtcatatgatgacgatgataagcagtacaggatcaattatgagaatgagcattctttcaatggaaagaaatgtctcgaggaaaatgtacaatctgccgcaaaagtgactggggatggatatgtgattgaggcagccttcaagtggacagacataaagccaaaaaagggtgacaggattggtcttgagttccagataaatgatgctgatgcttcaggagcaagaatcggaaccttaagctggaatgatgaaacaggcatgggctggtctaaatcatcggtatacggaacaatagagcttgcagcagaggcaaaggatgaagtgtctgatgataatagtaaaccgggtacagatgatccatcaacaggtaatacagaaaaaccgggtacaggcaagccggctataaataaaccgtcagcggataaaccggcaacaggcagcacaaataagcctttagcaaacaagccggcggcaaaaaaagctgcaaagacatcagatcaatcagcaacggcagcatttatcgtgttgtttcttgcaggagtttcgatggcaggggcttcaagattaagaagaagcagaaagcagtcataaactataaaagacaggacaaatatctataatttctcccggtgcaaagcaccgggagtttttgtatcatataatcattatagctgataaaattgacacaacaaggaggcagcaagatggcagggccaaaagcaccaaaggatccggaaagaaaaagaccttatttctacatcatgaaggataaggatatatacggctcagtacaggaagatggaagcattatacattttatatatgaaagcgacggaagactgataaacagtgcacagatagccggaaatatagaaaataaagaggaactgggactgttagagacagtggaaggttttggcaggcttgtacacagcataggtgtatctgtggaaacagataatcaaaacgaacagatcgaatttgtgtttcagatgtacggaaagcaggacctgtacggaggcggtactaatcttaaggtaaagctgacaggcgatggaatggagaaaaagatatacctgtcagattataagtggacaccggatgatgatataccgggacagataaagttcatatttaatacaccggatatcatgggaaaagcgagtgtcagactgtatctgaatgacggctatgaggctccggcagatattgaggaaacagaggtggatatgaactctgatgaatactgcaggatgataagccattcgcttatgaatatgggaaatgcatatcgcataagaaaagccatcgaaaagactagagccggaaaagaggtaacacttgcatacataggtggatctatcacacagggagcaggtgcggcacctataaatacagagtgctacgcatacaaatcctatcagcttttccagaagcgtttttccgcaaagaataatgtgaaattcataaaagccggtgtgggtggcacgccatcggagctgggaatgatcagatttgacagggatgtactaagagacggacagcaacctgatatagtagttattgaatttgctgtaaatgatgagggagatgagacaaagggtgactgctatgaaagccttgtacgtaaagtacttaatctgccatgtaaaccggcagtcatattgcttttttcagtatttgcaaatgactggaaccttcaagaccgcctaagcccggttggaaagctctatgatctgcctatggtaagcgtgctggatgcggtttcccctcagtttgcattaaaaaatgacgagggaagggtaataaccaaaaatcagtttttctatgatatgtttcatccgggcaatgcaggccattccgtcatggcagactgcatagagtatctttttgaaaaaatagatcaggcagggcatgcaagtttggatgcatttgaactgggactgacagaggaaaaaatattgcaggaaaaactaaatcttgcaccggtaataggaaacagctttgaaaatataagactgctcgacaaaaaggatatatatgcaaaggcatatattgacgagggtggcttcgattcgacagatacacagctgcaaagcgttgagatggatgctcagctttcgctgactccggaattcccgtataactggatgtatgatggcacaaaaaatacattaaacagggtaaaagcgtatttcgagcttgagatggagtgcagggcacttctccttgtatttaaggattcgggagaggtaaacgtgggaaaggcgaaggtatatgtggacggagaatatcattttacggctgatccacatatcaataactggcagcattgcaatgcggtaataatatttaacaataagaccagtgaaaatcatgttgtaagaattgaaattgcagaagaagacagagacaagcagtttacgatactgggctttggatatgtattataggaaatgagaggtaagagacatggtaacagcaaaaaatccaatactttcaggtttttatcctgatccatcaatatgtagagtcggggaagactattatctggtgacatcaagctttgtgtatgcaccgggtgttcccatatttcatagccgggatctggctcattgggagcagattggcaatatacttgacagaccatcgcagctatgcgtggaaaatgaagaaatatcgagaggtatttttgcaccgaccataagatatcatgaaggaactttttatatgataacgaccaatgtatcgcatggcggcaattttatagtgacagcgcaggatcccgcaggaccgtggtctgatccgtattatttgggagaagaagcagtcggaatagacccaagccttttctttgatgatgacggcagatgttattactgtggcacacgcccaaaccctgaaggagtacgctacaatggagactgggagatatggatacaggagcttgatcttggaaccatgaagcttaagggcaggagcatggccatatggaaaggtgctgtaaagggctgcatatggccggaaggaccacatatctacaagataaacggatattattatctgatgcatgcagagggcggcaccggaccggagcacagtataacgatagcaagaagcacggagctttttaaatggtttgaaggatgtccgagaaatccgatatttacacacagaaatctggggatggattatccggtcatctatgcaggacatggtgatctggtggatgatataaacggaaactggtatgtggtcatgcttgcgtcaagaccatgcaaaaagcacagcagcatgggcagggaaacctttattgcaaaaacaatatgggaaaacgaatggccggtaatagcacccgggataggacaccttgaggatacggtagatataccgcttgaagagtgcagatttatagatgagatatcagaaaatgattttataactttctgcgaagccaagcctgataagaggctggttggaataggaaaacgcaacgagtctttttattcccttaaggaaaatccaggagtactgagactgtacacaaacaaagagcagatcactgatcttggcacaagcgcatttcttggactaagacagaagggctatgagtttacggtaaagacagcagtgcgttttatcccacagtcggataatgagacggcaggacttgtacttttccagaacaatgagaatcatcttcgcgctgagataacaatggaagccgggaggctggtatttgtggtgactacacatattaagggaactgacaaaaagatagcagtggcagatattatggagtacagcattacagaaaaaaatccactgtggaatatatgtatgatctgtaaggaacaggaagcatctatatggataggtacggccgaaaagagcgtaaaagtcgcagaaaaaataagtctgctgccatataccacagaagaagcaggtggctttgtgggctgtacggtcggtatgtatgcatcctcaaatggcagcaatagtaataactatgcagaattttcatacataatgctcacccagtaaacattttgcggaattcagtcggggtgcagcccttttcagctttgaacacccttatgaaagtggatggatttgcaaagcctgactgcattgcagtctcggtgacagatatattgggatcagccagaagggtcagggcaagctctattcttttctgatttaagtatttgtaaaaggtattattggtaaactgcttaaatagccgggtaaagtgatatttactgaatccggctatttttgagatttcatcaagtgttatgtcctcagtgcaatgtgtatcgatatactcacagatagacagaaaacgctccagatattcctgctgtttgtgtctgccgacattaaaattacaactgctggcagtatgatgtcttccaataaggacaagtacttcaagcattttggagtagatcacggcttctgataggaatgagtcggtctggtattcatctgatatatcaagcaacagtttacggatattgctgtggatatcaccggaagtttccggggttagcgttatagcaggtgctataagggtaagtatggaattaaattcctttatttttgagacagcagaccactcaatctgcaggataagcctttttccggtgtcaggtgcgataagcctgtgtgttacaccggaagttataaagataatatcactctcattaagatgtaccagatcatccccaatctgcactgtatagccgccttcaagcggcatgataatctccatgggagtgtgccagtgaatgggataatcttctgcttccgtatttataaaaagctttacattgctgttttctttatattttactgtctcatgtattccattcagattttcgatcatatatacttgtctccatacggctgatatttatgcgcatttgcgtgaatatagttattatagcacaaatagcaatttttgaacattgtggggcaacaattagaaagaaaatactgcatgaatctggtaaaatcattatataaattaaaggagaagtcactatgagtaaaaaaactatagaatatgcaaaaaaactagtatcgcagatgacaatagatgagaagataagtcagatgctgtatgagtcaccggctatagaaagactggggataccggaatacaactggtggaatgaggctcttcatggagtagcaagggccggtgttgctacagtatttcctcaggcgataggtcttgcggcaacttttgatactgacctgatagaaaagataggagatgttgtatcaacggagggtcgtggaaagttcaatgaattttcaaaaaagggtgatcacggaatatacaagggacttaccttctgggcacctaatgtaaatatattcagagatccaagatggggcaggggacatgagacatacggggaagatccgtacctgacaggtaagcttggctgcgcatatataaggggattgcagggagatgatccggatcacttaaaatcggcagcctgtgcaaagcattttgcggtacacagcggtccggaagccataagacatgagtttgatgcgaaagcatcaaagcatgatatgtatgatacatatttgtatgccttcaagcgatgtgtaaaggatgcaaaggttgaggctgtcatgggggcttacaacagggtaaatggagaacctgcctgcggaagcaggacactgcttaaggatatactgcgtgacgagtttggatttgaaggtcatgtggtgtcagactgctgggcaatacttgattttcacgaacaccatcatgtgacggatacagttgaggaatcggctgctatggctgtaaacaacggctgtgacttaaactgtggaagtgcatttttacatcttaaggatgcttatgacaagggactggtttcagacgaggcgatcacggcagcagtagaaaggctgatggaggtgcgtatccgtctgggcatgatgaaggattatccatcgccatatgaggacatatcgtatgaggttgtagaatgtaaggagcatgtggagctttctgtggaggctgccagaagaagtcttgtacttttaaagaataaggacaatttcctgcctcttgacagaaaaaatgttaaaactattgcggttatcggaccaaatgccaactccagggatgcgcttataggaaattattatggtacctcatcaagatatatcactccacttgagggattacagcaatatcttggagaggatacaagagtgctttatgcagagggctgccatctttacaaggacaaagtacagggacttgcagaggaaaaggacagatttaaggaagcactcatcatggcagaacagtcagatgtggtcgtaatgtgtcttggacttgatgcaactatagaaggtgaagagggggatgccggaaatgaatatgcaagcggtgacaagctggggcttatgcttccgggacttcaggaggaacttttagaggctgttgcagcagtaggaaagccggtaatacttgtgctgtcagcaggaagtgcgatagatcttttctgggcagaagagcatgtggatgccattatagacagctggtatccgggagccagaggcggaaaggctgttgcagaagctatattcggagagtatagtccgaatggaaaactgccggttacattttatcagggcaccgaaaatctcccggagtttacggattattcaatggctcacaggacatatcgctatacaaatgagaatgtgttatatccatttggatatggactgcattatggtgagacaaactatgatggactgtcagtggataaagcagaaagtgatgtaaacgaacctgtcgaggtgtttgtaaatgtgacaaatgacagcagatatactgtaaatgagatagttcagctctatatcaggcacgttgatgctgcagagtatgagccgggatatcagctaaaggggattgaggttgtaaagcttgagccacatgagactaagaaagtaaagctgactctttcgccaagggactttgctgtgatagaagaggatggaagctgtgtagctgtgccgggaatttatgagatatccgcaggaggacagcagcctgatgacagaagcacaaagctcacaggcaagcggacagagcgcattgatataacaagatgtggagagaaaacaggggtagattattaataataaatatgttattctataattaatgacaagttaaaacagactttaggagcggacatatgtcggctcctttaagtgatttcagaggaattgtttatgagaagaccaatatggaatgccattgagagaaagcttgatgattattcactcagaaaaaaattctacatattttatgtactttgtgtcatgctgccgctcatagtgactgatgcagtggtgctttccatcgtagaaaatgctgaaaaagaaagcagcagacatgaaatgtcgagcatagcaagtgctgtgggatataatctgaacagcatggtcaataacgcagaagaggcagctaagagtatctacaccagcaagcgcatagacgattttatatcaaaggaatacacaagctctgctgagtatgtagcagagtatcagagcttctttcaggatacactttttgaaaacacacttggaatgagcaatatagtatttttcctgtatgctgacaatcctacaatagtaaatggcggaaaagtaaatgatatgtctgctgtaagaaatacggattcttacagacttctggagcagaaggaaagcggaggactcttttttgtatatgaaaaaggcgtagccggattgtcagatgaaagacatatgatttatatgaaaaagctggatttttactcatctgatatcgaaaaggtactcaagatagagtttaattatggcagcatgatgcgtacttttaagaatatgaattatgataatgaagtgcttatctgccatggagatgacatagtgctgtcaaatggggcctacagtggagtcaacaaaccatttaagacattggaggcgattgggaaaataagcgactccgtatacaggcagaagctctctttgtatggctgtgatcttgatatatatgtgtttaagacacgcagtaatatatggagcatgcttatgcacaatgcaccgattattgtttttctgatgcttataaatgtattctttccactttgtctgttcagtatctttaaccattcctttacgagcaggatattacagctttcaaatgtatttaagtcagttgacagcgaaaagcttgtatctatgactgacagggagagcaaagatgagatcggcagcatgataaaaaattacaacaggatggtaagccgcacaaatgacttgatccagactgtatataagaataagctaaaagagcaggagatgcttgtaagtcagaaaaacgcagagcttcttgcactgcacagccagataaatccgcactttctgtttaatgcgcttgagagcatacgaatgcacagtctgctgaaaaaggaaaatgagacggctgatatggtcgaaaaactcgccatcatgcaaagacagtatgtggagtggggaaatgatgctgtaaccgttgcaaaggaatgtgaatttgtaaaagcctatctggcattgcagaaataccggtttggcgagcgactgaactataacatagatatagaagcagactgcatggaatgtcaggtgccaaaacttacgcttgtaacctttgttgaaaatgcctgtgtgcatggcatagaaagtaaagctgctccgggctggatatttgtgcgtatattcaaaaaagccgggttcatgcatatagaggttgaggatacaggtagcggaattgatccggatgctcttgaaaaaatgaaaagtaacatgaaaaatgcagatatcgatatgttaaagaccggtggcagagtgggtgtgataaatgcctgcctgcgtatcaaaatggtaacggaatctaaagcagtatttgatgtggacagtgaggaaggctgcggtacgactgttatgataaaaataccggaaacatatttatagggagatttaaaatgcttaaagtattattggtggatgatgagcctttcataatacaggggcttaaggtgatcattgattgggaaaatgaagaatttgagatagcaggaacggcctcaaatggaaaggaagctctgcagtttctggaaaatgagaatgtggatctggtcatagccgatataaggatgccggagatgacaggacttgagctgcttgagactttgagaaaagataaaaaatcagatgtgtattttgtgatattaagcggttatgcagattttagctatgcgcagcaggccctgcagaatgactgtacggattacatactaaagccggtggacaaggagatgctgcttaaggtactaagcaaggttcttgtgctcaaaaacgagaaaaaccagatcaacgaagataacaaaaagatgaaacaggcataccttgcaagacacctgatatctctgatacagggcaaatatgatgaagtaaacctgaactatgtaaaagaaaatatgaggtgtgagggtggagcaaggtatgttgagatacagatggagcagcttccggcaggtgatgagatactcgatagtgatatgagaagcttacagcgcaagatgtacgaaagctgtgttgcttttctgggggctgattcggcacattgtgtatttgatgtatcggtaaatgaaaaagtgtatgacataggctttatattctcagattatatggcagaggaagccgcaaaaaacgagagaaaatatctggaggatctgagaaggtatatatgtgataatacacaaaagaatatagttatgctggtcggaagaaaagtatcagatatatcaaagatagccagatcatacggcaatgcatgtatgctcaggtcgtttcagggctttcgcatagtaaagagcatatattactatgaggatgaagtaaagatatcggcagatggaatagtgctttgtaaagatagtcttgataagctgcttaggacagtggaacagaataaccatcttgagataagaaatgcagttgccaaattttatgatgagatgtccagcatgggtatgaatggggaaagcatgaacttaaatattaattatctgttgtttcagttcatacacctggcaagtgagcaggatgataatgtaaatcagcaggagattttgcgactcataagtgagagcagctttaagaccggtattgagaggggaagccgtgcgcatatgaccagattttgctgtgagtatggtgattatctgtcgcagcttagaaaaaatgtgtcaagaggtgtgatcggcatggtagaaaaggaagtaagagacaattatgccacgaacatcacgcttaagagcctgagtgagaagtattatgtaaacagtgcatacttagggcagcttttcagaaaaaaatacggacagtcctttaaggattatctgaacaattacaggatggaacgggcggcagagcttctgcttaggactgataagaagataatacagatagcagaggaagtcggatatcatgatatggattattttgtgaacaggtttatacaggtaaaaggctgcacaccggcgcgtttcagacgccagatgcaaagtggagaataatatatattactgcaaaacagggtaaattatagttctttcgagaaactatagtttaccctgtttttgactatagttactccgattgtttgaaaacttaaaaagtataaaattaagttatcaaaagggaggacaatacaatatgaaaagaaaaagaattgtaagcatgctgcttgtggctaccatggcagcaacactgtttgccggatgtggcaatgatagtggcaaaaaaggtggcactgaaactggaagtgcgaaagagtttgatgcattctttgctgtaccgggaactgaaatcaatgatgataatgaaatccagaagatcatcgaggaaaagacaggtgtaagggtaaaggaaacctggcttaccggacagacagcagatgaggcaatcggaacaatgatcgcaggtggcgaatatcctgatttcattgaaggtgcaagcggacagatgcagttatatgatgcaggcgcacttgttccactggatgactacatcgagaaatatccaaacatcaaaaatcttttcacagatcttgagtgggaaaaacttcgtcaggatgacggacatatctattggataccacagtttagctgcataaagggagacgagaaagtctgcgcacacaatgacgaggcattctggatccaggcaagagtacttaaatgggctaactatccggagatcaagacactggatcagtattttgacctcatcgagaaatataatgaggcaaatccaacaatggctgatggaacagaaaatattccatatacaatcctttgtgatgactggagatatttctgtcttgagaatgcaccacagttccttgacggatatccaaacgatggatcatgtatggtagatcctgatacaaagaaagtacttgactataatacatcagatacagcagttaaatatttcaagaagctcaatgaagagtatcagaagggaattgtagatcctgagtcattcacacagacatatgatgaatatatctctaagctttctacaggacgtgtacttggaatgattgaccagtggtgggatttcgcatacacagcaggtgatgcaattaaacaggcaggtcttgatgagcagggatgcgattacattccggtacctgtaacaattgacggccgtgacaatcagtggcacaatgcaggcggcgctttcaacgagtcaacaggtcttgctgttacaacatcctgtgatgatgtagatgcggccatgaagtttgtaaatgatcttcttgatcaggatatccacaatctcagattctggggtgtcaagggtactgactatgaagtagatgagaatggtgagttttacaaaacagcagatgagagaaagaaggcttctgatacagcatacaaggcctctcattcatgcccatactcatacttcccacagtacagtggaacaagtgatgatggaatcaatgccaacaaacctgatggacaggcaagagagttctatgatggtcttaacagtgatgtacaagaagctttcgatgcctatggtgttaagacatacgttgaaatgcttggaacaaacaatgcacctggagattggtatccgatgtggtcatactctaacaactttaacacaagcactcctggtggagtagcctggacaaagattggcgaagttaagcatgagcagcttccacaggttgttatggcaaaaaactttgacaaagcatggaatacatacatggataaatacaatgcatgtaatccacaggatttcctaggtgaattacagactgagcttgataaaagattagagcaggctgctaaattcaaataaagcttaaatgaaatttaaggcaggcagatgtaatagcgttttatctgcctgctgcctttaaggagtgttgtcatgtcattaacgagagaaaataaaaaagaaaaggttagaaaacctagaacaaaaattacatggaaagaagtcaaacgccagaaagtgctgctgttctgggcagcaataatggtggcatatggagtcgtattctattatctgccgctcgctggctgggcaatggcatttcaggattacaaaccaagacttggtatatttcattctgcatttgttggattggacaaattcaagatgctgttctcggatatgacatttatccgtgttataagaaatacactcgcaatgggcgttatcaatctggttgtaacttttgtcacagccatagcatttgcaatcttacttaatgagattgcatcaaagggtggaaagaaagtagtacagactatatcatatcttccacatttcctttcatggatcattgtaacaggaattttacacgatatgctttcaggaacaggtattgtaaatgagttccttgtaaatatgcatattatagaccaaccgataaactttttcgcacatacgggatatttctggccgatagtggcatttgccaatgtatggaaagaaacaggatggaatgcaatcatatatcttgcagccattacatcaatagatccttcactttacgaagcagcatctattgatggagcgggacgctgggcaaagatcaagtacgtaacactgccgggaattaaaccaactatcataatccttcttcttatgaatgtaggtaatgttttaaatgcaggatttgagatacagtatctcttaggaaacggtctgatacagaaagtatcacagactattgatatttatgtacttaaatggggcataagccagggagattatgcaataggtactgcagcaggtatattcaagagtgtggtaagtataattcttatatttattgcaaataaaattgccaaacataatggtgaagagcagttgttttaaggaggtcttgtacgatggcagatataacagcaggctctgtaaagagcaaaaagaaaaagaagataagtatatttccaattgtaaattgcatcattatggtactgtttttgatcataacgctttatccggtgcttaatacacttgcgatatcgcttaatgatggtacagatgcattaagaggtggaatttacctcttaccaagaaagtttacctggaagaattatataacggttttacaaaaagataatcttataacaggagcatacattactgttgccagaacaataattggaacagtcttagcactggtggcaaatgcaatccttgcttttatagtcagcagaaaaagatttttgttcaaaagaggtttatccctgttttgggttatcacaatgtatgtcaatggtggattaatccctaccttcctcctgtacaagggacttgggcttaccaatagtttttgggtttatgtaatccctggaatggtcagtgcgtttaacatgcttgttatcaggacctatatgaatggaattcctgacagcttagaggaatcagcgcagcttgacggtgcaggatataccaccatttttctgaagatttattcccctctctgcaaaccggtatatgcgacagtagctttattcgtagcagtaggacagtggaactcatggtttgatgcaatgctttataaccgtatgagtacaaagcttactacattacagtatgagcttatgaagcttctttcagctgtaacaaatcagggaggatcagcagaaacattgaaaaatgctgtaggtgcagttacacctacctcagttcgtgccgcagcaacaattataacaatgcttccaatcatatgtatttacccgtttttacagaaatactttgttacaggacttacacttggtggagttaaagaataaatatttttttacagaatgcccggcaggataactgccgggtgttttggtgtaaatgtttatttgatttgaaaggagaattttcttcaaaccaggagcaaaatgagaaaaaataagcttaaggcagattggcccgcgtgccgtatatcgtattgctgatgacaggatgtatgaaaacaagcgcaaatcaaagatcggaagacaataatcaccaatttttatgataaaaatatttacattatcgtaatatatgataaaatatttctaatacgaaacacaatggctacataaacaataggatatatggaggaagttatggacgataacaattatatgaacaatgacaaccagtcgtcaggcacaccggacaatacagatgtcttcggtcagtcttcaggaacagcaaatggctcagacacatacagccagccgcaggacacatacagccagccgcaggacacatatagtcagccgacagacacatataatcagtctgtatcccagcaggaaagtgggaatgcatatgcatatggacagtcatcagaccagacaggcagcacagacggatatgtcaataatccgggcagtgcatatggttatgcaaatcagggtgcaaattacgctcaaacggaatgccagttccgctactgcggaacggctattccatttttaacggtacgaagtaccgctttttactccgcaactaagagtatgtaagaaatcacatataggctgagacaataatacgccaccgtccatattcgccatcgtggctcagtatggactcgctcgtatatccgtgtaagagcgttgctatgtgttgaagtgatttcaaacatactctaagttgctgcgtagatttgcttggaatgcataggtatgacggattccttgaattgtggatttattatacatatatatggcattatagtgttaaacttatgataatattatctaaatatacataatttattactgcatgatttaagataaaatatcaattatagatgatatagcaaaatgtttcacgtgaaacattcatttatttatataatatatgatttaatttttagtaatattttagtttattgacagtagtacggaatccgtcatacatatacatttcgcattcgttttactccacaactaatagtatgtaagaaatcacatataggttgagaaagcagtacgccaccgctgatattagctatcgtggctcagtatggactcgctcgtacatccgtttacgagcgctgctatgtatagaagtgatttcaaacatactctaagttactgcatagactcgtttgaaatttatatgtatgttgcattccttagattgtggatatgctttaaatgtagtatagtatagtacttataaaataaataaagtgtgaatttatattgtataggttaatattttacgttttgaattatatgattgtgtataatcaattattatgtaatttgattgtatagaattaaataaaatattaattgataagtataagtattaaatgataaaatgggaatgtttcacgtgaaacatttaagtgatataatgagtaaatacgagaaaactacgttttgataattagactgactaaaaattttaaatatgggatatagaaggtgacataatttgtatgaataaaaataattaaattattaaatgaagctcgagatcagaaggcaatactgcaacaatggctgatgtatttgccaaagaaacaattgaaaacaataatactgttacagaactttttcaattgaagatagtatatttcatgcttcggagaaaatgaaagtgaagatggcagtattatttttgcgtatgacacaagaaaaacagagaatgtaaaaaaataatgtgcatacatagtggaattttatagcattatacagttaagagtgatataataatttgagtgtggaagatttcaatttacaatttaaaaatatgatgattcggcagaaattttaagtaaattgcgaaaggatttataatgggaagaattatagcagttgcaaatcaaaagggtggggttggaaagaccactacttctatcaatttggcagcgtgtctggctgaaaaaaagaaaaaggtgctggcaattgatttagacccgcagggtaatatgacaagcggccttggcgtaaataaggacgaagtggagaatacggtatacaatctcatgcttgatgagtgttcaattgcagagagtattgaaaatacggtgatggacaatttatatgttattccatctaatgtaaatctggccggagcagagattgagcttttgggcataaatgataaggaatatatattaaagagtgcagttgattacataaaagatgactatgattttattattatagattgtcctccttcacttaacatgctgacagtcaatgcaatgactactgcagatacagttcttgttcctattcagtgtgaatattatgccttggagggacttagtcagctgattcatacaatcaatctggtgcaggagagacttaatccggagctacagattgagggagttgttttcaccatgtatgatgtcaggacaaatctgtcaaatcaggttgtagagacggtaaaagaaaatctggatacaaagatttacaatacaatgattccaagaaatatcagattagcagaggcaccatcatatggtattccgataaatatgtatgacagtaaatcggccggagcagaaagctacagaaatctggcaaaggaaataatagcgagaaaggatatttaagaaagtatggcggcaaaaaaaggattgggtaagggacttgattcattaattacagacaaggtatcaaagccggtaaaaccaaagagcaatcatgcagcggatgctgtaatgatagatattaataaagtagagcctaacagagaacagcctagaaagaaattcgatgaggatgcacttatagagttatcagaatcgataaaacagtttggcattttacagcctttactttgccaggaaagggatgattactatgaaatcgtcgcaggtgagcgaagatggagagcagcaaagctggcaggtataaaggaagtccctgtcataatcaaaaaattgaccaatcagcagattatggaaatttcccttatagaaaatattcagagagaggatttgaatccaattgaggaggctttggcatacaagcgtctgcttgaggaatttaaactgaagcaggatgaggtggcagagagagtatcaaagagcagaacagcagttaccaatacaatgcgtttactcaagctcgatgaaaaggtacagcagatggtgatcgatgaaatgctcactacaggccatgcaagagcattacttggaatagaagataagaatcagcagtatgtggtagcacagcagattttcgaccaaaagctaagtgtcagggatacagagaagcttgttaaatcattacagaagaacaagaaaaaggcaaagtccgaaaaacaggttaatcctcagatggaagcaatctacaaggatcttgaggaaaagcttaaaaagaatatgggaacaaaggttctaattaacaggaaaaatgaaaattccggaaagatagaaatagaatattattctcatgatgagctggatagaatagtaaacatgctcaattcagtccaaaatcaatagaataattagatagtatttagattttgtatatttaatgaaaagaaataataaaatcatacagaaaatgagacaaagagactatttaaattttatataaaatgtacgacaatatagataggagtaaaaaatgatttctgaatatttaggattcgattccgactacattatattaggattggcgggagtggtaattattctgctcatcctcataattataaatatggtgcagaccggtaagctcaaaaaaagatacaaagtgtttatgagtggaaaaactgcaaagtcattggaggacacaattatcaagagacttgacgaggtagatgaacttgttgcagcaaactcatcaatcaaaaagaatatagaagaattatttgataatatgaagtgttcataccagaaggtaggacttgtgaagtatgatgcattcaatgagatgggcggaaagctaagcttttcacttgccatgttaaatggaaaggatgatggctttgtactcaatgccgttcacagtcgtgagggctgctatacatacatcaaggagattgttggcggaaattccattattgttttagcagatgaagagcaggaagcgttgaatatggccaaggaggcaaatatgcctgcagaaaaataacaatgaagtccgaattctattgtagacccggctattttcgacaaatacgtggaaaaagtgcgcagactgatggaaagtcatatatatcatgatggaaaatccttaaaggaatttgaaataatcgcaaatgatattgtccatgatataaatgatatgccatatgacgtgattgttgatataaaagagcgtaattcggacttatatgagcacacagtcatggtgacacttttatcagtgcttgttgcaagaaagctaaagcttgacgaaaagcgaaagtataacatagcggtgggatgtttattacatgacatcgggctgcgttttattgtcacatgatataaaaacagggatttttccaatgcagatcctgcggagctttttgagtataaaaagcataccattttaggatattcggcattggatgaggaaagctggatagcgccaatatcaatgaagatgattttatcacatcatgaaaatatagcaggcacaggttttcctatgaagcaaaagaataaagaactggaatgcagaataattcaggcatgtgatgcgtttgattcgctgataagcggtatggagtgtaagcgcatttgtgtgcaggaagccataaatcagataaaggaaaataatggcaaattgatgcttcacaacagattgaatctcatgcttgataaaaacatttcaattcttcaggtaatttaaagaaaagagaaataagtaatgcaccaattcctcagagcaataggattttcagatataacaaagaaacagttaaacgaggtaattaacaatataatagataagccggaaaaactaaaggtaacaaaggattccgagggcaatgaatttgccgagctgtcatgtgatgtggcacccaatatgggaattacagtcagaggaatatacaatgacgatgatagctttgatatagattactactatccgtatttcatgggaagcgaaaagactacagaggagataatagatatcgaaaagcactcagagaaggaatcatatgcaggcgtatgtgatgaccctaatctcggcgtaacacttatattttatctgcagaatgtgtgtgattatctgtcagagaaggcatacataaacagagaggtaagggcaaagggagcagtgctctcaggactatcagttgatggctgtattttgctaccaatgaaacaaaaaaaggctaaaacattaaatacagttgattcagacaaaaaagatagaaagcagctgattgcagaggccagggatggcgatgagggcgctatggaaagcctcacaatggaagatatagatttatactcatccattacgagaagaatccaaaacgaggatattctttcaatcgtaacaacatatttcatgccatatggcatcgaaagtgaccagtacagcgtgctgggagatattattgagttcacagaagaaaaaaatatcattacaaatgaaaaaatatattgcataaaagtatcatgtaatgatataatatttagcgtgtgtataaacaaaaatgacctcatcggtgagccgatggttggcagacgtttcaaaggaaacatttggatgcagggtagtatttgtttgtaatatacatttgttttcatagttaaatggatataacaagcgcctcctaaggttcaatcatggttgagacttatggaagctgagaagtgataagtcagagttcgattccaacagggattgacctaaatgtcaaaataagatacaatggaaattcatcacaagagtggttgaattcatagatatggcagccggagccaaaagagctgaaaagcccaaaatacggcatttgtctccttagttaaatggatataacggggtcctcctaagactctattgtaggttcgattcctataggagacgctcatttttagcggtaatgaagatagtttcattgccgctttttttgtgcagaattgcaatttcagtgacaaatttgtcagcgaaacaaggttgaaaatactgactttgtcagcggggatggatgcttgtcaccgattcatattttccggtctgtcacctagagggattaactacaatgtaggatgagttttggggtgtaaaattaggaaaagcagtgagataaaacactatattcttgcctgtgatatcaggcctgtcggaagagtccgttcagattagataaaaacaatctattctggacgggctttttgcgttcagggaaaggaaattgcctatggaagaaaagaaggaattgcagaatcaggatgaaagagttgtagagattgagctggaaagacttcggggatttgtaaaccatccattcaaggttcaggcggacagtcagatgattgaattgcaggagagtattaagaagtatggaatattaaatcctctgatagtcagaccgaggcaggatggaacttatgagatcatatcgggccacagaagaaaatttgcagctgaaaagataggttatcgtaaggtacctgtgatcattcgtgtattaaaagatgacgaagcggttgtatctatggttgattcaaatttacaacgggaaatgattagtccaagcgaaaaagcatttgcttacaaaatgaagtatgaagcaatcaaaaggaaggcaggaagaagaaaatgtggtcaggtagaccataatttgggaaagaaaagcattgagctcattggagaagaatgcggagacagccccaagcaggttcagaggtatatcaaaataacggaacttattcctgaaatgcttgaaaaggtggatgacggaagcatgggatttaccccggcagttcagttgtcatttctgaaaaagaaggagcaaaaggaaatgctggatgcaatggaatttgctcagtgcacaccatcactttcccaggcactccgtataaagaaattaagttcggatgggaaccttacagtaagggatatggaagatatcctaagtgaaattaagcaaaaagagatagaccgcgtagtattcaaaacggagcagcttcacagattttttcctgtcagttacacggcagagcagatgaggcgtgaaattttggaaatgttgaaattaaatatgaacaaatattgggatgcataaaggaggaacggattatgtgcagagtaatagcagtatcaaatcaaaagggtggagtaggtaaaacagtgtcatgtgtgaatcttggaattggattggcacaggaaggaaaaaaagtacttctgatagacgctgatccacagggaagtcttacaatcagcctgggatatgaggagccggatgaaatggagtattctcttgcaacactgatgatgaacattgtgaatgatgaaaaactgaatatagaaaagacaatcttacaccataaggaaggcgtggaccttatcccagctaacattgaattatcagcaatagaggtgtctttggtaaatgccatgagcagggaactgattctgagatctatggtagacaggctgagagaattttatgattacatcataatcgattgtatgccttcacttggaatgatgacaattaacgcattagcatgtgcagattccgtactgataccggtgcaggcagcatatcttccggtcaaaggcttacagcagctgatcaagacaataggaagagtaaagaagcagctgaacccaaagctcaagattgaaggaatacttttgacgatggttgataacagaactaattatgccagggatatttccctgatggtgtatgatacatattctgcatcaatcaaggtgtttggaacagagataccgatgtcagtaagggcatcagaggtcagtgtggagggtggaagcatctattcctatgatccaaagggaaaagcggcatttgcttatatggcattaactaaagaagtattgaaggaggcagagtaattatggcaagcagagtagcaggaaagattaaattacagtcagtagatgaattattgggagtaccggagattgccggtactcaggaaatagagattgaaagaattcatgcgtttccgaaccatccgtttaaggtgctggatgatgaaaagatggatactttggttgatagtatcagggaaaatggcatcctgaatccagtaattgtaagacctgatcagagcggaaattatgaaatgatatctggacatcgcaggttacacgcagcaaagattgtgggattgaaaaaggttccggctatagtaaaggaaatgtctgatgatgaagccattataaaaatggtggatgccaatattcagagggaagagatacttccgagtgaaaaggcatttgcatataaaatgaagcttgatgcattgaagagaaccgctggaagacctacaaaagaaaatgcgtgccataatggcacacatttacgatctgatcaagaattagcattacaggtaggcgacagtgcaagaagtattcaaagatatatcaggcttacagaattgattcctgaattattggattatgtagataataagaaaattggactggtaatggcagttgatctttcataccttgatgaacaggtgcagaaatgggtatatgaatattttaaggaaaatggatttttgaagccggtacaggttgaagcattgaagaattatcctaacttatccaatgtaacacaattcagtgtcatttctataatgaatgatgcattaccgaagaagagcaaggaatcaaagctatctttttcagcaaagaaactggataaatattttccaccgcagtattcaacaaaagaacgtgaaagtataatcattcagctattggaacagtggagtgcagatcaggtacagtcagagtagaaatataattatgatgttccagaagtgtagaaacggcacttctggaacaggaaggagattcaaatggaagacagaataagactatcctatttctatggaaaggaagcggatcagttttcattttataaaataccgaagttattatttaccgaagagtatttcaaaaaaatatcagtggaggcaaaggtgttgtacgggctgatgctggataggatgtcactatctatgaaaaatcagtggatggacgatgaagggagagcttacatatattattcgcttgaagatatcatggaggctctgggatgcagtaacaaaaaagcaatatccataatgaaagaattggacacggatgctggtataggtttgattgaaaagaagcgccaggggcagggaaaaccaaccatgatttatctaaaacagtttatggtgcaggatgttcagaagtgtagaaacttcacttctgagcaaaaagcggcagtttcagaagtgaagaatttacatatcttgaagtgtaaaaatgccatgtctagaagtgaagaaattacacttccagaagtgaaaaatattcacactaataagaataatataaataatactgagttaagtaatactgaatcttatcttatcgtatctggaaatgatgagataggatccgacgtacaggcatatgcagaacttatcagagataatattgatctggatattctgttagagagatatccgtttgacaaagagttacttaacggcatctttgatctgattttggaaacagtgttatgcaggaacaatgaaattgtagtggcatccaataaatatccggcagagctggtcagaagtaaatttctgaaactgaccagttcgcatattgaatatgcaatgggatgtatgaaatcaaataccacaaaagtgcataacatcaagaaatatctgctggcaacattgttcaatgcaccaagtacaatcagtggttattatcaggcagaggttaaccatgattatccccagtttgctgtaagtggcaaataatgacttgacgtatacggatttcgtgtatataatcaaattaacaaatagacacggattccgtatatggaggcagatatgagcaattttgaaaattatgattttatattacctgatggagtggtaattgaaaatgaaaaggctgataaagaaggaaggaagaaaagaatgtctgctatgtgtgtaaaggtccgtgaacagacaaatatgaacagaaaagaatttgctgaatggcttggaattccgtatagaacgatgcaagactgggagcggggtgtgagcgaggtccctgattatgtactgaatcttatagcatataaagttaaaaatgaaaaagaaaaaggaaacatttgataattgtatgtaaggcatggaggtatccggttatgtatgaagatgaatattattatgaagcacggaaaaaagaaaatgcaaaattagatgccgaactggcggggacatttgcaaccgtcataggtggattgattggtgcagtgttatcatgcttattatttctgctaaggagatttgatgtattaagctcaggattggcatcattattattctatatgcttacttattaggtaattgcgaaactcgcgatgctcgttcgcaaacttgaatcaaaatagaaacagaattgagcatagcatgattttaatgacgaaaacggatattgagctgttttaggcgcacttaaataagccgtagactttattgagttggtaagtcctaagcaataagaggttttaagctgcgaataaattcgtgatgattgattttatccgaaagtacaactgttatcagttgggtaattcctgcaaggatcagatcggcgtgaagtgttttctcattctcagttcttcttccggccagacaaagattatccttgatgtggttaatatctctttctacggtggttctgattttgtaagtgttattccattcttctgtaccacggatagcgccaggataggcacggagatccttttcaggataaatatacaccattctgccacaagaagaagctgtacatggatcatcacatgtacagtgacgctgggatctgccagtagatgcatttttgatccacttgattttaggacagacaaacttatatctggtaacaccgcttctgagttttgatattccttcatatttcatgggaagtgaatcatcatgaggacagcagggaatcccattttcattaatcgtgtagtcctgtttttcaagaccagccctggaattcagagggatataagctttatcaaagtgtttatgatctccgaacgtattaccggtaagaagtttgggatagagtgccgcagtatcaaaagcagcatcgccaagaaaagttttgggattaatcaatggatgctttaaaaagaaatctttcagggttggaattaaaagcctggaatcatggacagacttgtcttcatcaggtgaatcagatttcttttcaacggtaatgtcaggatgggaagctataaagtttttgttataaaaagcgatatgcctgatgattccaagaccgttggtaatgatgccaaatttgaagacataacagaaatgcccattgatgtataactgtttaatttcaggattagcagacgcgtgcgaaggcatagaaccataagcggctttataaggatcataattcttgtcgaagctgttagcttttgcataagccttaagctgtctgataatgcggttagcatacttgggattattctcagtaacaaaagcttcaatgcctgaagaattaaagatggtcatatcggcttttgcggaatcaacagcctgacagattggttcggtgaaatcaacaagtttatcaaaaacaagctgcagatcatctaaaaagtcctgtttgaagcgtgtaatcttagaggcatcagggactttggtaaaaccgcagaaatcacgaagcggtttcgagtaaaccagaaaagttaaaagaagctggtctgtagggattgagaagatacgctggataatcaaagcccacaggaaagcacgtaaagggtatttacgggatcttcccgttgatgcatagaaatgatttctaaaagaaatcggaataaactcatcaatatcgatatgggtttctaatagagaaagaaatgcaggcttgtcattattaaatttattttggcaatcttgaaaaatatctgccaaagaaagctgtttatatggtatcatatgtatcagaataactcctttcttgggtacatggtttgtagtttttagtcaactctattataccatatccggtgaggagttattttaatttggtaacaaaaaatgccgtatttatgcggtctgtggcgtttcgcaaacgcctatatgcttacttatacaagagagtggcatgtggctgtctacattacagtggcttttgtaatattcatcgcatcaatgattttacaacatgcgttcttggcaggaagaattatttttacaatctttgtaagtatggcagttgcaataataggtgcaggctggaaagcatatgatacagaaattcagagaaatacagttatggtaatatgttttgcagttactgtgatactaggtctgatatcgtggaaaggaataaaagctaaggaatcttaataactgcgacgaacgactacggtttgactactattttgttacaaatgactacggtttgactactattttgactctttttttctgaataggggtgtgataatattatcatagacaaatgagacatgaaacgcgagagcggtcaggcatttgtttctcttttgcaaaagaatatggatcaagaatgaagcgtcagctcattaccggatcggtgatgggtatggcgcttttttgatgcaaaaatcaggtgacatctgaataataaaatcaggaggaaattgcatggcatatgaatatgaccatgactgtccgtttgaagccttcatcaccaatcttggaaaatacaacgagggtgagctggtcggcgaatgggtgaagtttcccaccacatcagaagaactgcaaaaagtatttgaacgaattggaatcggctcaaaagatgatttcggtaatccttatgaagaatggttcattagtgattatgactgttatgttgatgggctgtatgaaaagctgggagaatatgaaaacctggatgaactcaattatctggcttccaagctcgatgagctggatgatcatgattataaccattttcaggcggcaatgcagatcagtgattatacaggcagcattaaagatgtgatcaatcttattgataacctggataagtatgaaatctatccgggagtagaaagcaatgctgatctgggacattactatatcgaagaactcggtatgatggaagttccggattatcttgctgattacattgattatgaggcctacggcagagatgtggccattaacgaaatgggacagtttacagattatggatatgtgagagatacacaggaatattttacagaatattacgatggagaccgtgagaacatcccggatgaatacagggttatggattttaaggtttctggtgagaaagagaggaaaactatgaattacgaaacatttaagcaggaatttgcagaggatatcaaagaaaagctctatgagagaggctatgatgatgtaaggatcagcttcaataatgtggagaagacaaatcagaattatgaagctatgtcggtcgttccggaaggcagcaatgtgggggttaatttcaatattgagaatgcctttgcaaactatgagcacacggatgattatgccggagtgcttgccagtgcaacaatggtcattgctgatggtcttgacagagcccctgctattgatgtaagtgctcttatggattatgagaacatgaaagagaagctttctgtggaagtcatttcagcggatgcaaacgctgatctgcttgccaacgtaccgcatgacagaatggaagatctggcagttgtatatcgttttgtgatggagagcagcgaagatggacgtgcatctattctggtcaccaacaatctgatggatcgtatgggagtttcccatgaacagctcagggcagatgctttggagaattcaccggagatcagaccggtagtgatcatgggaatgaatgaggtcataaaggaaatgattgacccggaagtatatgagatgtttggaattccggatgatgcggaggaaacgatgtacgtcgcaacagtccctgataagaattccggagcaggagtaattgcctatcaggatttcatggatcaggcagcagaaagagttggcggagatttctttgtgcttccgtcttccatcaatgagatccttttagttcccgataatggagacatgacagctgatgcgctcagggatatggtaaaggatgtgaatgccaaggaggtaagcccggaggaaagactttctgataatgtctaccattacgattccaaggatcatgtctttgaacttgcagagaagtttgaggcaagacagcaggaaaagaaaacggagattgatgaaaaatcagaggagaaaggatccgtattaaaagatctgaaggataagcagaaggaagcagctacaaagcctccggtaaaggatgctgcggaaaaagcagcaaaatcaaaaggcagagaagtattataaaaaaaggattgtgtcagcctgtggtgattgccatgggactggcacttttttgatgggaaggaatggtgattacagtggcagaagcacataagggtacaaacggacagaagggaaagagttacagcggaattggtggaagaccacctataagtcatccacaaaattgcagccatgagtgtccgtaggagagaattgaattatgaatcgttttacatatgcattgaagcaaagaaatctggaagaattaagaaagtatcctaaggcagacctgcacaatcattttgtgcttggtgggagcagaagtttcttatatcaggcagccggtaaaaaaatcgagccattaaagaattctttgtcatcgatgggggaaatggatcaatggagtcaaaaatacattggtcaggattttaacagcactgagatgagaaaacttttaatcaaagccacctttcaacaggccaaagaagacggagtaactgtgcttgaaattggtgaggatgtctgggggttaaatgaattttttcataatgatattgatgagctggttgatgcttttacaagtgcgcaaaaggaaatcgctcctgatatagaattaaggcttcaaatcggattatcaagacattgtcctatcgattatttagaagaatgtttatctcacttttggggaaataaaaatttttattcgattgatctgtatggtgacgaattagcacaaccaatcgaaaattttaaaggaatttatcgtcgggcaagaaaagaaggattaaggttaaaagcacacgttggagaatgggggactgcgaaagacgtaagaacagcagtagaagaattagaacttgatgaggtgcagcatggtatcgcggcagccgatgatgaatccgtgatccgctttctggcagataataaaatcagattaaatatcacaccgacaagtaatattttgcttggaagggttgcggatatgtccgtgcatccaattggaaaactgtatcgcagtggtgtcgatgtcacgataaattcggatgatgttttgatctttgactcagacgtatccaaagaatatctgcgtctttatgagtcgcagtgtttaatggcagaagaattagaaaacataagaaaaaacggactaaaacctatcgcagtatagataacttcaagtttgcagaactaatagagaaataacatataaaacaataaatatggtcaaaaaatcatcgacatccgacctacagcacgttataatatagttaatctaataagaaaaccaagtgatcattgttacgaagctgaatcgtaatggtggccaactgagtgaactcgatggaacggaatggttatatcctccgggtgctccgagcaccggacgagcaccgaaaggtgctttacagagatgaaaacaggttttcttattttgacagggagtaacagaatagttaggaaaatcaaggatttctttgacttatgttgactaatcattgtatgtatttacagtggtatctcgagctcctaagcgctagttgggggttcgattccccctgagaacagttgtttgaagcagtaatgattaagaaaattcattactgcttttttcattttggggtggaaaaatctgtaaaattggttttcttgtctgagaaatcagacctgagagatataaaacgctcagattagatttaaaaaaatctagtctgggcgtttttttagtccagggaaaatgaggtcaaacatgaatataggtagtgagaaacagagagaccatgatgaaaaagttgtggagatagaaatgaaggacgtttttgacgtctgctcttgacatgcccgaaatcatgtcgtatatatatagcaagagctggaatactgatccagataagcattgttacaacagacacaatttcaaaatcagaaattgttaatgcacaggcaatgtacagcaataccatcggaaatgagatataatattgtttttttcatatttcaaaaagagaataaagaaatgtcagaaaaaagatgttatacagttcaagagttacaggaaatcttaggagtcagcaggtctactatttataatcgttgctgatgaagtcgattcggaacttctggcaaaagtattggctaatccagagatgtgggcatttctcaattcactggcgaagacgatgaagtaatgaaaaacacgattaaaatgcgggataaacactgcttctaaagaacataatatgattatggaatagagagaaaaacagaagggaactgaattcatatgtttacgcatgagatgataaaatcctttaatcagttggagatggatgtgtataattacatcatcagcaatgaagagaaagtagtatatatgaaagtacgcgagctggcagaggcggttcatgtttcaacaacgacgatccttcgcttttgtaaaaaggtaggatgcgagggatattctgaattccgtttgaaattaaaacaggaagtcagcagcaaggaaaagaagaaaatcaatatggatcttactgcggttaaagatttctttgaacgggtgcagacacaggcatttgctgagaatatccaggaagctgtgaagttacttacaaaggcatcgtcaattatatttgtaggtgtggggaattcttcttttataggaaagtatggggcaagatattttaataatgtaggctggttttcatttgctattgatgatccgttcacgccagtatttcgtggaaaaggtgagagaatagctacaatcgcattgtctgtatcaggagagacggaacagacactgatgttggcagaaaagttgaaaagaagagggagcagcctgatatctattacaaataaggcaaactgttctttggcgaagatgagtgactgcaatataaattattatgtttcagagtataaatataaacaagacgaagattatgatctgacatcccagatggcagtcgtttttattttggaattaatcggaagagaattgaagggcgtccataacgatacagatgatatgttttaaaatgatatggaagacttatttcattaaggttgtagaatgtaatggtacgaatagtaaccagataagtaacaaaaaaaacagaatatacgaaaaagtatcataatatacaaaaaagaaaaaggaaaacagtgcattttacacaataaagtagaatgccctgttttttttatgtaacaaattccgtctatatggaacagaaaccagaaacaggaaaaagtattgacaaaacgaaaaatacttgttatactagcaccatcaaagcaaatgagaaaaaaataagggaggaaacaatcatggtaattcgattattttgtgcagcaggaatgtcaaccagtcttctcgtaaagaagatggaagaggcagcaaaggaaaaaggaaaagatgttgatatcgtagcatatccatttacagagatggaacgcgtgattgaaggcgtggatgtagcactgctcggaccacaggtaggatatcagcttgccagagcaaaagagatctgtgatccaaaaggggttccggtagatgtgatcccaatgcaggattatggaatgtgcaatggaatgaatgttttgaaatttgcatataagcttgcgaaaaataaataagagaaaacaaagatacacaatttaaagcaaaaaacagagcaaagggtagtagcaaatgaaagagaaatttaacgaaaaagtaatccctgtaatccttaagtttattaatacaaaggcaatacagtcaataaaaaatggtatggtgacttccatgtctcctctgatcatcggatcaatcttcctgatcctgtcaaactttccgataaaggcagttgtcgatgtattagagtctacaggaatcaaaccagtattagatcaggtatgtggcgcaacattctccatcagtgcgttgattgcagttatcggtatcagctatagctatgcgaaactggaaaatcaggaaccactcaactgtggaattatttcactggcaacattcttgattctgatgccttcgtccataacaacagaaggtggagaagttgttagtggaattattaataagacatggacagcaggacagggaatgattggagcaatcattgtcggattgattgtaccgcctatttactgttggttcttgaagaaaaatatacgtattaaaatgccagccggagttccggaaggtgtaacaaatgcattctcagcattaatcccggcattcgtaatcctgacaggggctgcagtaattcacggtatctgttctattggattcgacacaacaggtattgaaattatttacaaagttgttcagacaccacttcagaaaatgacagattcccttggtggagcagttctgatgtgctttacaggaccattcctgtggttcttcggagttcatggttcaacagtagttggtggaatcatgacaggactattacaggcaaacagccttgcaaatcaggctattattgacagtggtgtagaacttacaatagcaaacggaggccatattgtaacacagcagttttatgatcagtttatcaatataacaggtgcaggtatcacaatcggacttgtaatgtatatgttcttctttgcaaaatcaaaacagttgaaagcacttggtaaattgggaattattccggcattatttggaatcaatgagccagtcctgtttggtgctccagtcgttatgaatccaatgcttgcaattccgtttattggaatgcctgtgatcgcatgtttaatccagtattttgcactgtatacaggaatctgcccattatatggagcaacacagatcccatggacttgtccaccgattatctcaggattccttttagcaggatggaaaagtgctttacttcagttagtgatcctttgtgtttcattctttgtttatctgccattcattaagaagattgacaagatgaatctggttcaggagaagaatcagccggtagaagatgaggatgaagactggtaaaatcagaataaaaataatagcaggataggagaaaaaaatgaacgaaaaatttgaattgtcatgttttcagatcatcacatatgtaggtacagcaagaacacattttatcaatgcaatccattgtgcgaaagaaggaaaatatgatgaggcagcagagctgattaaacaaggagatgaagccttttcacttggacacaacgttcatgcagatcttttggcaatggatgcaaatggtgaaatttccaatggatacatgcttctgatgcatgcagaagatcagcttatgagtgcagaagcattccgcattcttgcagatgaattcattacactgtataagagaattgatgagaaataatcatcaagatgtaattgaatatagaaacagaaaagttgggggcaaaagcccccaacgctattatacaaagcaattaagacaacaggaaggaaataacaatgggatttcgaaaagattttctctggggtggcgcagttgctgcccatcagctggagggtgcctatgatcgagatggaaaaggcttgagcattatggacgttgtaaccggcggagatgtaaatacaagaagaagaataacaggtgaaatactaaaaggcgagaattatccgaatcatgaagcaatcgatttttatgattactataaagaagatatccgcttatttgcggaaatgggattcaagtgtttccgtacaagtattgcatggacacgtatcttcccaaatggtgatgaagaacagccgaatgaagccggattaaaattctatgatgacatgtttgatgaatgtctgaaatatgggatcgaaccagtgatcacactgagtcattttgagatgcctctgcatcttgtacaagagtacggtggatggagaaacagaaaactgattgatttcttcgtgaaatttgcagtaacatgctttgagcgatacaaagacaaagtaaaatattggatgacatttaatgagattaacaaccaggcagatatcggtgatggatttatgctttatgctaattccgggattataattaaaccagaagaaaatgcggaagaattgatgtatcaggcatctcactatgaactggttgccagtgccgaagcgataaaagctggacatgagattaatccgaaatttcagattggttgcatgatcgcaatgtgcccaatctatccggctacctgccgtccggaagatatactgcaggctgaaaaagccatgcagaaaagatattattatacagatgtgcatgtaaaaggggaataccctgtaaatattttgaaatactgggaaagaaaagaccttaagatcgacgtaacagaagaagatcttgcagtgttaaaacagggctgtgtcgattatatcggtttcagttattatatgtctttctgtacaaaagcagaaccagacaatccggaatatgattaccgtggagaaaaggatcgtataaagaaccagtatgtaaaggcaagtgaatggggatggcagattgatccgatcggactgcgctattcattgaactggtttacagatcgctacaaagtaccactgtttattgtagaaaatggatttggagcatatgatactttagaagaggatggaagcatccacgatccataccgtgtagaatatctgcaacaccacatttcagaaatgaaaaaggcggtagaggaagatggtgtagatctgatgggttatacaccatggggatgcatcgaccttgtcagtgcaggaaccggtgagatggataagagatatggattcatctatgtggataaacataacgatggaacaggagacttgtccagaagaaagaaagattctttcgagtggtataaagaagttatttcaacaaacggcgaaaatatcaattagttaatagaatgactattaaaaaaagtgtctatatcaagaaacgataaaaggttctgatatagacactttgactaaccgatacatcaagtaagtttccatcaagatataatcttgcatattcaagaggttcatcaatggcgagtgggtttaatgcacagtctgatcctggtgtggtttttaagtccttttcagcttcctaacagtcaatgcggagccatatagccaacagaggtgtaaacatcaatactgttgtgcttgggattgtattctgcaaatattgttctcatcatatcaaatctccttatcgttaaatcaatcatttgttgcaaaaatcagaagcatttcaatcagttcaccatgtcacttttattttgtgttatactgttttatataattttcttggtcttgtttttgctcttatcagagttcataaacactggtgggacgatataacgcacaatatatataaataagcattatacggtcaatttaatatcgacatatgaccatatttgcgttataatgaaatcaaatctaataagaaaaccagataatcattactggatttgtaaaatacaatggtggcagattatgcacctgaaagaacagtataacaaataataggtcgagggcttaatctggttaataacggagaaaaacagatcggaattgtatgaagttttgaaggtacaaaccttaataatcctcgatagctcaatggtagagcactcggctgttaaccgagttgttgtaggttcgagccctactcggggagttttttagtataatatatggtgacatagccaagtggtaaggctccggtctgcaacaccgtcatcgccggttcaaatccggctgtcacctctcttaaaaggactacatcagtttatgatgtggtctttcttttatataatttgcaaataaaatatattgtgaattttatttaatatacgtaatatgtgttgcaaagatttcattatttttaaattttctacattacttttcagaatgctacactaaattaataaagagaaatataagtctgataaacagaattatatttctcttttttaacaactcttatccttttttgaatagttgtagtagtattattattcctcttcaggatatttcataccccattcggttcttatatcagacatgattttcataacatcatatgtatactgactgtgaatgaggttttctatttcatcggatgatgcagagtttatggctttttccatatcacatacttcgtaataaagtgcatctgatgtatcacctgcatcaattacttctttatgaccattctctgtgtatgtaatagttgcctgcattcctcttggatactcaaagatttctacatatgctttgtcaaaagatagtgtagcgcgttttggctgtttggaatgtagagataatgtgactgttgccatctcggcagcatcattcataagcagaatgcctacctgttcatcaacaccggtcggagcatatctaacctgtgacaatacatgcgacggtgtttccttgaagaaccagcggatgagagaaagtgagtaaacaccaatatcaagcagtgctcctcctgcaagcttacggctgaaaaacctatttgtcatattgtaatctttgtagcttccaaaattgacctgaattaaattgagtctgccgagttgtccacttgaaattattttatttaactttttataaacaggcatatgatatatagtcatggcttcagcaagaattacgttatttgctttggccaatgagattgcctcatcgagctctgtaatatttaatgtgatagatttctcacagagtacatgccttccattagaaagggcttttcttaaataattaatgtgagtattgtgtggagtggagatgtaaatgatatccacatcaggatcataaaagacgtcatcaatgttgtcatatacctttgaaatgccatatttttgtgcaaaagcttgagccttttcatgagtcctgttggcaactgaataaagagtgcgcccttcctttgagagagcctgtgcgagctcattagctattacgccgcagccgagtgtggcccaattaagctgtttcatatgaattcctccttttttaataaggtactgtagctgtgaaggtatataaattattacaaattcagttaaattacaaaatatcaacttaaatcataaaatataattaaatcaaaaatatattcaaatcaaaaatatattcaaatcaaatatactcaaatcaaaaatgttcaattaaataataaaatatgcaccgaaatcataatatatgtaccttaatgaagatattctagcatgatgatttatgaattacaatatatttagaaatgaaacagtcaaaatcagtcaaagttagattgattcaaaatcagtcaatttgaactattaatattaattataaattagtaatagaaaagatactaaaaatagtaattaggcaagtattgatgatatatatggtatattctgcacaaaaatgaatgttgcatttgcatatattgcacaattttaaaacttgctttatatatttttaacaatttttagtgtgattatttgtgaatataaatgactgattatgattgacaatgacggattatgaaaatataattatactacaagttaaataaatgttgaaatgtttaatacagtaatttgaaaatgagcattaaataaatggcttataaaataagtctttgaatagtttcataaacaggggggattagatgctggcggaagatagatgtaaaaaaatactcgatatattagattcgatgggaagtgtgactgttcagcagcttatggatgagcttgatatatctgagtcaacaatcaggcgtgatctggttgcaatggacaagaagggttatctcaccaaggtacatggtggtgcgattgcaaataatacgaatatccatactcaggatgagaaggttatcaacaggcttaagcagaatcgcagcgaaaaggaacagattgccagatatgcggcatcacttattgtggataatgattttgtttatatagatgccggtactacaacggcagtcatgattgattatattactgcaaagaatgtggtttttgttacaaactctctgactaatgccaagagaatttccgataggggatatacagtatatattctgggtggcgagttcaagtctactactgaggctattgtcggagatgaggccgttgtgacgctcgataaatacaattttacgaagggcttctggggaactaacggaattactgtgaagaatggatttacgactccggagataaaggaggccatgattaaaaagaaatccatggagaatagcaaggagaaatacattcttgcggatgacagtaagttttcacaggtatcaagtatcaagtttgctgattttaaagatgctgtaattattactaatgcactaagcaatgacaactataagaaatacaaaaatattaaggaggtctaacatgatttatacagttacttttaatccatcattagattatatagttgatgtaacagattttaagacaggagtggtcaatagaacgactggagagaagatttttgcaggtggtaagggcatcaatgtttccatggttcttaagaatcttggaatgagcaatacttcacttggttttacagcgggttttacaggaaatgaaattaaaagacttctaggaaaaaaaggtgttgatactgattttatagaggtggaggatggtatttcacgtatcaatgtgaagcttcgctcaaatgaggaatccgagattaatggtcagggaccggtaatcactgaggacaacattaaaaaactttatgagaagcttgactgcttaaaggagtctgatgtgcttgtgctcgcaggaagtattcctgatgtaatgccttcatcaatgtatatggatatcatgaagcatcttgagggccgtggaataaatattgtggttgatgcgacgagaaatctgctcacaaatgtgcttgcgtataagccgttcctcattaagccaaacaatcatgaactcggtgagatattcggtgttgagattacagacaaggacgatgtgataaaatatgcaaagaagcttcaggagcagggcgcaagaaacgtgcttgtttctatggcaggtgacggagcagtgcttgtgaccgaggatggacaggaatttaaggcacaggctcctaaaggaaagctcaaaaactctgtaggcgcaggtgattcgatggtagccggatttgtttacggatacctcaaatcaaatgattataagcaggcatttatttatggtgtatgtacaggaagtgcaagtgcattttctgaggagcttgctacaaagtctgaggttgaagcacttattgataaatgggagagttcttccaattaaacaacggtatcaaaaaggttgatataaataattaatatattctattaggaggaatgatgtatgacaatcagggatttattggcagctgagagtatcaatttaaatggtacgcctgccggaaaaaccgaagcattgaatcagtgtattgatttgatggcaaaaagtggcaaaatatccgatgtggagaagtatcgcaagggtgtttttgcaagagaggaggaaggcacaacaggaattggaatgggtatagcaattcctcattgcaagtctgatgctgttactaaagcaggtcttgcggcaatggttgtaaaggatggggttgactttgaatcactcgatggtacacctgcaaagattattttccttatcgctgcaccaaacacagaggataatgtgcatcttcaggtgcttagcaagctctctgttatgctgatggacgagcagtttacaaattctcttatcaatgccggttcagttgatgagtttttaaatatcatcgatagcgctgaaaaagcaaaggatgagaaagaggctgccaaagaggcaaaggcgaaagagcctgctgaggtgaagaaggacgatgtatttatcgttgcagtaacagcctgtcctacaggaattgcccatacttatatggctgctgaggctatcgagaaaaaagccaaggagcttggatatcaggtaaaggttgagacaagaggctcaggcggagccaaaaatgtgctcacagatgatgaaatcgcaaaggctgcaggagttatagttgcctgtgatacaaatgtacctacagaccgctttgacggaaagaaggttattgagtgtcaggtttctgacggaatcaataaggcagaagagcttataaagagaattgcttccggtgatgctcctgtatttaaggcatcaggtaaaaaagaggcttcacattcatctattggtggaaaggagagcattggacatcagatttacaagcatctgatgaacggtgtttcacatatgcttccgttcgtagttggtggtggtatccttatcgcaatcgcgttccttatcgatggattcagtgttgaccttaattcactgccggctgaccagagagcaaatttcggtactattacacagggcgcagcattgtttaagggaatcggtggaacagcatttggatttatgcttcctatccttgcaggctttatcgctatgagtattgctgaccgtccgggtcttgcagttggtttcgtaggcggttcaatcgcagcaaacggtacatcaggcttccttggagcactggttgcaggtttcgttgcaggatatattgtaaatctcttaaagaagatattctctaagcttcctgagagtcttgatggtgtgaagccggttcttctttatccgctgcttggtatattcctcataggcgttataatgcagtttgtagttgagcctccaatcggagctttaaatacagctatcaacaacggtcttaatggacttaacggtgcaagcgcagtagttctcggagtacttctcggaggaatgatggcaatagatatgggtggccctgtaaacaaagccgcttatgtatttggtacagcttcaatcgctgccggaaactacaatatcatggcagcagttatgattggtggtatggttccaccactcgcaatcgctcttgcaacaatcttcttcaagaacaagttcacagcagaggagagaaaggcaggacctacgaactttatcatgggattatcatttatcacagagggtgcaatcccattcgcagcatctgatccgcttcatgtccttccggcatgtgcagttggttcagcagtggcaggtggactttcaatggcatttggatgtacactcatggcacctcacggaggaatcttcgtagtacctacaatcggaaatccgttaatgtatcttgttgcattagtaatcggatctttcattgcatgtggattactcggattactcaaaaagaaagtaagtgaataagcaatcctcaattatcattttttaatccaacctataaactaatcaacaaaggcactgcttcggcggtgcctttgttgttatgttgtgtattaaaaattaaaagtataaacattctctgaaataacagcctcatgccttgacgagtgaattttcgaagcataaagtattattaagatgtaactattcagaaaataaacattagtaaacagtgaggcataaaatgggcaaggttataggtatagatttaggaacaacaaacagctgtgtggcagtattggagaacaatcagccggtagtcataactaacagcgagggtcagagaacaactccgtctgtagtggcttttacaaaaaatggagagcgactggttggagaggctgcaaagaggcaggcagcagtcaatgtggatagaacatttttctcaataaagagacagatgggaagcgatttcagggcaaaggtggatggaaagctgtattcagctcctgagatttcttctatgattctcagaaagctgaaaaaggatgcagaggactatattggtgaggcagtgacagatgctgtaatcacagttcctgcatatttttcggatgcgcagaggcaggcaactaaggatgcaggaaggattgcgggtcttaatgtgcttcgaatcataaatgagccaacctctgcggcactcgcatacggactggaccacggacagcagcagaaaattcttgtctacgacctcggaggaggaaccttcgatgtgtctgttatcgaaataggggacaatctgatagaagtgcttgccacagccggtgataatcatctgggtggagatgattttgatgagagaatcacgaattatcttgttacagagttttacagacagcagaatgtggatctgagaaaggataatactgctatgcagcgtgtcagggaggaggctgagaaggcaaaaaaggtgctttcatcctcatcctcaaccactatcaacctgccgtttatcaccactgtaaagggacagccggtccacatggagatgaacctcacaagggctgagtttaatgagataacaaaggatctggtggagagaacggccattccggtaaatcaggcactttcagatgcggggatttccgcagcagagcttggaatggtgctgttggtaggaggctctacacgtgtgccggctgttgttgaggaggtcagaagaattacaggaaaagagccttcacacaacctgaatcctgacgagtgcgtggcactcggtgcagcagtacagggtggcaagctcggtggagcaattgtcgcaggcagtagtgcggcagagattatactgatggatgtcacaccgctttcactcggaattgagacagttggtggtgtctcaaccaaaattattgacagaaatacgactattcctacgagatacagccagatttttacaactgcaggaagcttccagacctctgtggatataaaggtactgcagggtgagaggcagtttgcaagggacaataagctgattggaaacttcaggctaaagggcatcaagccggctccggcaggtgtgccgcagatagaggtgacgtttgatatagatgcaaacggcattgtgcaggtttctgcaaaggacctgggcacaggaaagcatcaggagattacgattaccgcaagctcgaatttgtctgattctgagattgagcaggcaatccgcgaggcacaggagtatgaggcaacagatggacagagaaaggcttatattgatgcaagaagtgaggctgatacgcttgtgcgacaggtggaaaacgttatggctgacaaggaaaaaagaaaggctatggacagcgcacagaaaaagagtgtgaaatcgtcactttcatatgtgaagaagcttatttcaaggacaaagcccggaaatgtgagcgaagagcaggctgccgagataaagcatgcggcagacgagctgagaaatgcggcagcgggattgatttaattataaatgaggggcagaataccttttgaccatcatatcattattattcatttggctatttacgagaagcggattttcatataaaatatgggtaagtggtgagtattcagaaacaccctgaatagttataatgttaatttaaatccgaggaaatagaaaatgaatgcgaacgataaaacagaaaaggtactaagagaaattcatatcatgctctcaaaggcggagccgtataagccggagccgagcagggtgatcataaacaagcagcaaatgatagatttacttgctgagctgaataagtgtatatatgcaatgcaggatgagtatgagcttactgagcagagtcgtaatcacgcagagagagagttcagaaagaagggggatcagatagtctgggatgcaagcagaaaggctgaggatgtgtatgcagcatcggttatctatacggatgaggcgctttcaagagtgcgtgatatcatcaatgataccaacgagtcacttgaaaagctgtgcaagaatatgaaggataagattgcagaacaggagaagatagttaaaactaaccagtatgagctcaagggacagcttcaggatttgtccgatacggagaagtatcttaagattatcgatgacagaaataaggagatagaacgtcagaaaaatgaaggtaagccagtagaggagcgtactattgacaaggaagagaagtctatctatgcaaacagacagactgaaatcaaggtaaatatggattatatcagaaaactgggacttgctgagggcgaggacctgggagatggtgtagtgggtgaagtgaagcttgcagacgatacacctgatgccggattaaatcatagcaatgataaggatgaagccaaggatgccggctcaaaatcgtctgttgatggggattataaggcaataagcagaaaagccggcaatccacctgttatcaatacaatggaagggaaggagctcacagccggcatccacagaatgtggcagagcatcaccggaaataaagggaaatgaaacacacatatgtaatataaagcagcagttcaaaacagaacggctgctttttggcttatatttaaaagtgggtaatattaagcagattttaagaaaaacaaagtggataatctgataaaatatagctgactaacggcaggagaaggtttctgttcaaaattcatagaaggaggataatatgacaatattagtttgtgatgacgacaaggaaatagttgaggcaattgagatttacctgatgcaggagggctacaacgtggagaaggcatatgacggcatacaggcagttgaaattatgaagaataaaaaaatagacctcatgataatagatgtcatgatgccaaagctcgacggaataagagctactctgcagatacgaaaggaaagcagggtgccgataatcattctatcggcaaagacagaggatgctgacaagattttaggcctcaatgtgggagctgatgattatgtcacaaagccttttaatccgcttgagcttgtggcaagagtaaagtcacagcttcgcagatataccactctgtcaagcaatgatgcagccggagacaaggtttatgaagccggaggccttttggtaaatgatgatttaaaaaaggtgactgtggatggcgaggaggtaaagctcacaccgattgagtacaatatcctgcttttactccttaaaaacaagggaaaggtctactcaataaacgaaatatatgagagtatatggaacgaggaggcgataggcgccgacaatacagttgctgtgcacataagacatatcagggaaaaaatagagataaatcctaaggagccacgctatctgaaggtggtctggggagtaggctataagatagaggacaacaaatgaagcagtatacgataggaaaaaaagcagcggtcatagtcttacatcagctatgcatgatacttatggtaacaggagtgtttgccacaggctatgcattcaggcacgatgcacatgaaaatattgatatatatacactaatatcgctggcgggcctggtaggcagctttgtgagcctggcatatatggcaaacgtggccggcagaaaatcagaggatgattatacaatatactatttaccgattgacaaggtatactctgatgtgatgctggtgatatttacactgctcatggtatttatgggaaaagtgatttcaggcgtaaaaaaccagcattttgactatgcatcactcattatgacggccggcacatttacttttttgtttgatctggcttttattattttataccagagcattgtaaggaagataaaaggcaatatactttacacacacagcctgatgtacaagggctatgagcttttgaaaagagttattgagaaaaaggatatccacacacaaaaaaataaagagataatgcgcatacaggaggcacttgaagctatctcggaaggagcgcttgacactacactcaatgtcaatgagtttcatgggcagcagaaaaaggtggcggaggctgtcaaccatatacgccagggtcttatgagctcggtaaatgagagccttaaaaatgaaaaactaaaggcagacttaataacaaacgtatcacacgatataaagacacctctgacttcaatagtcaactatgttgacctgcttaagagggaaaatctggaaaatgaaaatgccaaatactatatacatgtgctggaggaaaagtcacagcgcttaaagcagcttacagaggatttggtagagacatcaaagattacctcgggaaatgtgaagctcaatatgcaaaagcttgatctggttgagcttttataccagaccggaggtgaattcaatgagcgctttgagtcgagaaatctgacaatagttacaaaaattccatcagaacagatatttatctatgcggatgggcgtcagctttaccgctctattgaaaatctgtatactaatgccgcaaaatatgcactggaaaataccagagtgtatgtagagcttgaaaaggcagatacaaaggcagtttttacaataaagaatgtgtctaagaacgagcttgacatagtaagcaacggaaatgtagacctgacagagcgttttgtgaggggagagaggtcgagaaccactgaaggaagtggacttggactttcgattgcaaagaatctgacccatttgatgggaggaaaattcgaaattaaggtagatggtgatttatttattgccacaattacctataatattatataatagtaaataaaagaattttgaaatacacatacggaggtagaataagtgaaattatatgaaaatggtgcttaccttttaaacggtaaggaagtaataattgatggaccagaggctcaggcagctgtcaaaagcaagaccggcatggacatcgataaacagacagctaagcaggagacaattgcttacggtattttaaaggagcacaatacatccggcaatatggacaagcttcagattaagtttgataagcttacatcgcatgatatcacatttgtaggtatcatccagacagcacgagcttcaggacttgagaaattccctatcccgtatgtacttacaaactgtcacaacagcctttgtgcagttggtggaacaatcaatgaggacgaccacatgtttggtctcacatgtgcaaagaagtacggcggaatctatgtaccacctcatcaggcagttatccatcagtttgcacgagagatgcttgccggcggcggaaaaatgatacttggttctgattcacatacacgctatggtgcacttggtactatggcagtcggcgagggtggacctgagcttgttaagcagcttctcgaacagacatatgatattgatatgcctgaggtagtaggtatttacctgacaggagagccgatcaagggcgttggaccacaggatgtcgcacttgcaattatcggagaggtattcggaaacggcttcgtaaagaacaaagttatggagtttgtaggaccgggtgtgtctaatctgagcgttgacttccgtataggtgtcgatgttatgacaacagagactacatgtctttcttctatctggagaacagatgaccaggttaaggaattctttgagattcacggtagggctgaggaccacaaggagcttaatccgggtgaggtggcttactacgacagatttattgagattgatttaagccagatccgcccaatgatagctatgccattccacccaagcaatacctacactatcgatgagctcaatgcaaacctcatggatattctcgatgactgtgagaagagagctgaggtaagctttgacggcaaggtgaagcttgatttaaagagtaaggtaagagacggaaaactgtatgtagaccagggaatcatcgcaggctgtgcaggcggtggatttgagaatatctgcgatgcggctgacatattaaacggacattcaatcggagcagacgagtttacactgagtgtttacccggcatctactccaatatacatggagcttgtgaaaaacggagctgtagcaaagcttcttgagacaggtgcaatcgtaaagactgctttctgcggaccttgctttggtgcaggggatacaccggccaacaacgcattctctatccgtcattcaacaagaaacttccctaacagagagggttctaaggtacagaacggacagatcagctcagtggcactcatggatgcacgttcaatcgctgcaacagcagcaaacaagggcttccttacatcagcagcggatattgatgtcaactttacaaagcctaaatatttctttgacaagactatatatgagaaccgtgtatttgacagccatggagtggcagatccttcagttgaaatccagttcggaccaaacatcaaggactggccggcaatgagtgagcttcctgagaatatgctccttaaggtggtttcagagattcatgatcctgttactacaacagatgagctcattccttcaggagagacatcatcatatcgttcaaaccctcttggccttgcagagttcgcactttcaagaaaggatcctgagtatgtaggcagagcaaaggaaatccagaaggcccagaaggctatagagagtggtgagtgcgcaggaaaggctgttcctgaggttgctgaaatcatgggagtagtaaagaaaaaattccctgaggcaagccatgagaatatgggcttcggaagcacaatttttgctgttaagccgggtgacggctcagcaagagagcaggctgcaagctgccagaaggtactcggaggctgggcaaatatcgcaaacgagtatgccacaaagagatatcgttcaaaccttatcaactggggaatgctcccattcatcatcgatgagggagagcttccgttccacaatctcgactatatcttccttccgggaatcaagaaggaaatcgaggatgcaaagacggagtttgaggcatatgttgtcaaggatggtgaattaaagccatttacactgaagatgggtgagctcacagatgatgaaagagagataatattaaagggatgtctcatcaactataaccgtaaataaggagagtctaatccgatggaagaaaccagaaaagctggtaaaaaatcaaacattgagataaatgcagataagggtgcgaagcagaattcgcacccggggcgtgaggaatggccacatctgatcagaataggtgtcatggtatttgtcacgtttgcagtcagtatactgtttttctttgcactgtacagatttgagggctttgcaggcatatggagcaagctgcttgcggcagcaatgcccattataatgggacttgtgcttgcatacctgatgaatcctgtcatgctgtgtctggaaagatgctttaaaaagcttctttccaaaaagatgaaaagcgaaagcaagctgcgaaaggtttcaagagctcttgcaatcacaggctcggttattattcttgtagcgattatttcgctcctcattgcggctattgtgccttctgtcatagcaagtatatcaggacttattaagacactgccaaatgacgttgcggcattcatcaacatgataaagaacggcaatttcggaggcagcaaaatagctgagctcgcgagcacatgtttacagaatacaaccgactacattgagaattatgccacagaaaagataattcctgaggcacagaagtatgttgcacagattacaaccggtgtgatttcggtagtcagaggtttactcaatttcattatcggaataatcgtgatggtctatgtgatgagtattcaggagactctcgcaggacagagtaaaaagataatatatgctgtctgcaagccaaagacaggcaatatcatcattgagacgatcagaaagacaaatgagatttttggaggcttcataagcggtaagattatagattcactgattataggtgtgatcgcatatttcggatgtctgattttaaggattccatcatcggtgctcgttgcagtgattatcggcgtcacaaatgtgattccggtattcggaccgtttatcggtgcaattccatcgttactcatagtagtaattcagagtccgtggcatgcactttatcttctgatatttattgtcgtgctgcagcaggtggatggcaatataatagggcctaagatacttggctcatctaccggtctttcgaccttctgggttatgtttgccatactaatcggcggaggaatgtttggttttcttggaatgttacttggtgttccgacctttgctgtgatatactatattgtgagaagagttgttaattatgctctcaggaaaaagaagcttcctgaggacacaatggattatacaaagacaacaggcgtagatacaaaaaataataagcttaaatacgagtaggtgaaataagtggataaatacgaatacaatctcaagctggaccagataaaagccctaagcgccgaggagggctatatgagcgcagcagagattgcagatagcataaattggaacaaaattaaaaatgtaaatacactcgttaaaatcggtgaaatctacgagaaggccgaaagataccaggatgcaagggatatacttttaatggcctatgaccgttcaccaatcggcaggatgattatatacagactggctgaggtcgccatcaagatgggtgattatgatgctgctacagagtattatgatgagtttgttgagatagcgcctcatgatgatatgaagtatgtattaagatatgccatcaaaaaagggcagggagcttcatttgatgagcttatcactattcttgaagagtacaaggatgaagaatacactgaggagtgggcatatgagcttgcatatctataccacaaggccggaaaagccgataagtgtatagatgcctgcgatgagctcattctgtggttcggagacggaccatatgtggagcgtgcgctggagcttaagatgctttatcagccacttaccaaggctcaggaggaaaagtacagacgattcaaggcagagaaggaaaagccggctgagataaaggatgatgctgaggtcactgagataggtgccatggagatggtaaagggcggagagatagtgcatgatgacgtaactattccgcagattactgtaaatcaggagaagttcaatactgtaaatttacagcaggagattgccaagggtatgcagcagatcattgaggccaagggcaagaatgaagttgctgatacgatggataccatcaaaaagatagttgaggatattccttatcttaagctcgaaaaggagcaggaagagtatgtacagcagccggaagagacagaacatatcgctacagatgaagagatagatggttcacttaagttgaatttcaaggagcttttgggtgaagacgctgacggacagatgtctatggtcatgagtgaaaagactcagcttgagcatcagattacaggacagatgtctatacatgatgtgcttgaagaatgggaaaagaccagacatgcggctgaaattgcacttaaagaggctgagcagcagaagcttgagtcagctaaggcaagagcacttcaggaggcaggagacatcatggagagactaaatgatgtcattccaaagctggatgcaggtgtcactccgaaggaacttcttgaggaggagtatttgaaggtgccggttgatattatagagcagaaagctgccgtgaaggagcctgaagaagggcagaaaccggatatgcaggagctttatgcagatgagattgtggatgaagcacaggagccgcaggaagcacctgaagaggctatagacgaaatacaggagtcacaggaagcacctgaagaggctatagacgaagtacaggagtcacaggaagtacctgaagaggctatagacgaagtgcaggagtcacaggaagtacctgaagaggctgcatatgaagccaaggaaccggttggagagccggatgatataattgtggcagaggagtctgagaaagacgagatattcacgcagccgactaccatgatgcctgaaataacagatgatatgttaaatgtcgatgatgagacttcacaggagaaagaaaacgtttctgagaagagagattttgatcatgtgacatcatttatcgagcaggaaatagccaagatgacagcaaagaatccgggactggagaagaagctggatatggctaagacaagaaaaatgccggatatttcattgccggaggatttagacagcgaagaagatgactcgaaattgaaagaaacaaaacatataaaagagcttacaagcgaacagaaagctatattttcatatttcataccggtaaagggtatggaggatcagatttgcaaggcatataatgcagtacttgatcatttcaacaggaaagaaaacgcatccacaggcaacctcattatacagggagagcagggttgcggaaagacaatgcttgctacaagctttataaaggtattacaaaaagatggtgaacagcttacaggaaagatgggcaagattgatgctgccgcactcaataaaaaggatgtgcagcaggtagtcagaaagataacaggaggctgtctcatcatagaaagagccggtgatatcgaccgcagcatagctgcccagctatcatttttgatggagcatgatattacaggaacactctatatacttgaggatacatcaaagggtataaagaaggctctctcaatggatgagggctttgcatccaagttcacggaaaagatatcggttcctatttttacaaatgatgaactcgtattgtttgccaaatcgtactctgcagagcttgggtacaagatagatgagatggctattctggcattgcataacagaatcagcaatattgagaggatagaccaggctaccactctgacagaggtcaaggatataattgacgaggccatagacagggaggctcacagcggacttaagaaggctataagtattctgacagccaggcgatatacagatgatgaccgaattgtactcaaagaggatcatttcagggaaaaataaatacttatggggggtatatatatgtgtaattttacagcaatggattgttacctgtttggtcaggcaacacactatgatatctacaagaagatgggtgctcacttagctgagcgtaaaggaaaaaaaggagtgtgctttgacgtctgggcgccacatgcgagggaagtatacgtgtttggtgagtttaacgactggaatgagaccagtcatgagatgaagcgtgtagagccggaaaccatgggagtgtatgagctttttgtaccgggagcgcaaaagggtcagatgtataagtttattatagtcactgaacagggtgataagctgtacaaggcggatccatacgcaaactacgcagagcttcgtccgggaacagcgtcaatcatcacagatatcgagcacttcacatggactgacaaagagtggatggataagagagcagcaaagtcagatgctgatgtatattcttcacctatggctatatatgagtgtcatccgggctcatggatgagacatccgggcagggatgatgagggcttttatacatacagggagcttgcaaaatcactcatatcctatgtgaaaactatgggatatacacatattgagcttatgggtatttcagagtatccgtttgatggctcatggggatatcaggtgacaggctactatgcacctacatcgaggtatggagagcctgaggattttgcatactttgttgatcagtgccataaaaataatatcggagtaatcctcgactgggtacctgcacatttcccaaaggatgcgcatggacttgccaatttcgatggaacagccacatatgagtatgcagacccaagaaagggagagcatcccgactggggcacaaagatatttgactacggtaagaatgaagtaaagaacttccttatcggaagtgcacttatgtggatagaaaattaccacgtagacggactccgtgtggatgcagttgcgtcaatgctttatcttgactatggaaagaacgacggacagtgggtgccaaacaagtttggaggaaataagaacctcgaggcagtagagtttttcaagcatatcaatacactcatacttggaagaaatcacggaactgtaatgatagccgaagagtctaccgcatggccaaaggtaacaggcaaggtagaggaagacggactgaacttcagctacaaatggaacatgggatggatgcatgacttccttgattatatgaagctggatccatatttccgtaaaaataaccacaacaagatgacatttgcgatgagctataatgagagtgagaaatatattctggtactgtcacatgatgaggtggtacatctgaagtgttctatgctcaacaaaatgccgggcttagaaggggataaattcaagaacctcatggcaggatatgcatttatgatgggacactgtggaaagaagcttcttttcatgggacaggagtttgcacagaagcaggagtggagtgaggaaagagaactcgactggtatctgcttgagaatccggagcataaaaagatccagaactgggtaaaggagctgcttcacctctataggagaaaccgctgtctgtatgagctggattcaagctgggaaggctttgaatggataaatgcaaacgatgcagacagaagcatcttcagctttatcagaaagagtaaggatggcaagaataatatgctctttgtcatcaatttcacaccggtagagagacctgattacagagtcggagtgccaaagcacaagacatatcagctcgttttagatagtgaggatcctaagtttaccggcaaaacggtacaagcgcctgtaaagaaggctgcaaagggcagaggcaaggcagcaaaacagtcatataagaagctggactataaggcagtcaaatcagagtgtgacggcagaccattttcatttgcttatccacttgcgccttacggagttgctgtatttaaatactaatataccggtaaacagcagggtaaaggaccgcgccaatttaaggcgcggtctttatttttgcgtattatatgtcgatatatagtaaaaagataactattcagaaccactgagaacaaaaaaactgatgcgtcatgcttgcatgtaagcagcagattttcttgttctcaaggtggctctgaacagttggataaaaaatacgaggtatgaatatccacaaataaaggctgcagagatggtatatatgcagggcacggagcaggaaatatgcagatagagaatttgattaataaaagcacagatacgaaaaatacggacacaaaaaccataaatgacatgacagcgggtatgcgtgtgtcagactacataaagacagacagcagtgacaatatgtcaaaaaaggcggctgttgtcggttcgtcaaactctgttgatatgtcggatacgatatatgcaagaccacaggctaaaaacgaagccgggaacaacgatggcacagatatggcagaaaatctgctaaatgacatgaatcagacctcagaaaacaggcgaaatgatatgattgtcactgcaagcaccaccacgagtgatgattacaaagctgcaaaggatgacggctacgatgtcattgtcactgagaccgataagataaaagcagtgctggcaaaggcaggtgtagatatatccatatatggagatgatctgagcatggagcagcttacagacatcacgggaagccagactgaagcggccatgcttgtcaatcagatgaaagcatatgatattcctgctacagatgataatataaaggcaggtacagatgccatagaccgggcaaagagccttacaaatatatccaatgagacaaaggcatatctggtcagaaataacatgaatccgacggtttccaatgtatacaaggctacgtacagcagcagtcaggtacaagattacaggcagaaaaccaaaatgacggagatatcagatgagctgtttgaggagcttaagccacagcttaaacagatattagaggaagctcatatagacagtagtgatgagaatctgaatcagtgcagatggctgatagatgaagatatagccgttacacctgataatgtgctgcttgcgaatcaggtagactgcatcaacgcagcagaagaaaatgtgagcagtgatttttatgcaagggcagtgacagaagcactggcaatgggaaaaaaggctacagatgccactatgtcacaagatggtctgacatttgacatggcaaagaaagcctgtgatgtattaggtgaggcgaccgcagatgacattgtcacattagagtcagataacatacctgtcacgatagagaatctgtcaaagcttatagctgcaagaggcaaggatagtgcagcatcgcaagcctcagcgaataaagctgcggataatcagattacagacagccgggaagcaaggcttgtgacagctcaaagaaagcttgaggaagcgagactttccatgacagcagaagccaacctttcactcataaaaaaaggagtttcaatagacacagagcctattgaacgtgtagtggagctgcttaagcagcaggaaaataaatactacggagcgctgtttggtgagagcagtgtagaggcatctgatgatagggtacgtatgtacaataatgtctgtgatattttcaatcagatgaagcagcagccggcgtatgtactgaccctggaatccgctgatgacactgtgtatgagctgtatacagcaggcaaagcaatgaagcagtcattagaagcagcagcctcaggatatgagactcttatgacatcaccgcgggcagatatgggagatagtatgtcaaaagcatttcagaatgtggatgatatacttaaagagcttcagatagatacatctgaaagcaatcgcagggctgtgcggatacttgcgtacaatagtaccgacatcacagaggacaatataaagcagataaagtctgtagatgagcaggtgcagagagcattcagcgatatgacaccggcggtgacgattgagatgataaaaagaggcatatcaccgcttgatatgagcatgagtgacataagtgacactgccagacggataaaatcagaaaatcctgacgaaaaggatgagaaattcagcgagtttctctggaagcttgaaaagaaaaatgaaatctcagaggaggaaagagactcatatataggcatatacaggcttatttcacaggtggagcagtcagatggtgctgtgataggctcacttgttaatcagggagcagatattacaatgaaaaatctgcttacagcggtccgggtacgaggaaagagtgccatggactataaggtggacgatacctttgccggagtggacagtgtaagcagtggcattaaaattgactcacagatagaaagcgcatatcatacaaactgcctaagggatgtgcttgatacactttcacctgagaaaatggagtttatgcagtatgacagctggcttgatatgactccggagcagttaaggcaggctgtatatgaggcagacgaggataacgcactgtcagagcaatatgccacagaacagctaagacagttcaatcaggcagtttcggtgcctgagaacgtatatgcttttctagagaaatatgatgtaaaaacaaccgcggtaaacctcatggctgcgtcacggctaatgaaaaatccgtcagaggcagtaagaaatctctgggagcgtggagacagtgctacggcaagggctcttttggatgagactctcagacggttttctgagtcggtcaaaaatccaaaggagcttgcgcaggcgcaggaaacgctggctgatacagcagagcatgttatggattcgatgattatagaggataggcacaccggttcaatagacctcagacagatgaagctattatgcagtcagctaaggatagcttcaaatatgtcgagacaggaaaactatattgtaccaatagagactgcagacggggtcacaggtatgaagcttagtatagtaagaggcgaggataaaaagggcatggttgacatattccttgaggataaaaaatgcggcagagtagctgcatattttgaggcaaaggaaaactcagtatctgctatgatagtcacagacgatgagcagactaaaaagctgtttgaagataatatcactatgtttgaggcaggaataagtgatggtgaacagcgtgtgcgcatagatgtggcactggagcatgatatatctgcaaaagagtctaagatgtcagatatgaaatcgaatactgagtcagataatgagactaaaaagcagcttgatggcagtgaaagtgtccagacaaccagactatatcacatcgcagagcagtttattgtaaatgtccagagggtgattgcgcaagatagtctgtaacaccgatatatattgcatgtgccaggtcatcctgatagtttttgtcagtaagaagaagtgtctcagcaggattactcaagaatccacattctacgattacggtcggggatgtggattttttaagtataaagtattctttattgggcttaatgcttcgtggctttgcgacacaaagagaagtgtttaaagctccaaggacagaggatgcgagctcttttcctgcatcagaggcttcataatagaatacctgtggaccgcagcttgaattgtcctcaaagctgttttgatggatactgatgctgactgccacattgcttttagacatcagggcagttctctttgtgagatcatctgtctttggatgcttggaattatccggggcgaggtcgcagtcggtggttctggtcatgacaacagtaaagcctctgttttcaaacagctgtttaagagccattgcaatactgaggttgacatccttttccatgacgccggaggtggaaatcttaccgggatcacttccaccatgtgctggttgtagtttacgcaaattgtgatatgtattccccagtatatatggggagttagaaatgtattgagattagatagcctttttctccaagtcctcacagtaaacgcttgaaaataaatgttccagttcatttccgaagttgtatgagattttaagtttgcggttttcataaactgttatctggtctatcatttccacaataatatctctgtctaattcttcaatgtctttcagttccaacaaccgccttaaccacggtgtttcaaaaacatcttctgttacactttcttttttcttttcttccagcgtttcaatctgtttggagtaaagcgtttctttttgttgatagtcctctcgataagaaagaaattcttctttagaaatcagttcgtctttgtaatcttcataaattgactttttcagtttctttactctttcaagttctgtttttaactttgtcagttctatgtcagttgattttctgatttttgttgctgtgaaagattgtgattttacaagctcctgcaaattctctacattgcggataatctgctttaaatcgcccagcacaatatcattcaatacttgaaatgggagagtatgcggagtgcaatagtcctttccacttcttttgtaagttccacaatagaatgaataagacctgcttccgtctgcacgtcgccagaaatttttcatcattgcccgaccacaatcgccacactttataaagcctgcaaagatatttttatttgtttccaagtcaatatccctatgcttctttgtcagcagtttttgtaccttatcccacagttgacggtctataatcggttcatgcgtattttcaactcttatccagttttctttctcaactggtcgctgtttgcttctcatacgctgatgtttcttcccttgtatcatgttgccgatatacatttcatttttcaacatgatatttactgttgaatacgtccaataggaagttttctccaaacggttgcaatttttataattttcaccgttgagctttttatattccgacggacaaaggataccctctgcatttagtatttttgcaatgctttgttttcctattccttgtgcatacatagtaaatactcgttttacaacttcggacgcatattcatcaatcacaagtttattcttatttgcaggagatttcttatagccatagcttgtaaatgctccgataaattctcctgctttctgctttgattttacagtcgcttgaactttattagaaatatctctggcatactgttcgttaaatatatttttaataggaagtaacatatcgtatgcctgcttcatactatcaatattatctgttacagaaataaaacgaacattaagctctggaaatattctttccaaatatcgccccgtatcaatgtaatctcgtccaaaacgggaaaggtcttttacaacaacacaatttaccttgttatcttcaatgtcagcaatcattctatgaaagtctggtctattaaaattcgttcccgtaaaaccgtcatcaatataaacatcatataagataaagtcatcatgcttattcacatattctgttaaaagttttctctgatttcctacactatcgctttcttccttatctccgtcctctcgtgataatctgatataaatagctacgttaaataagcttgaacctttttgataaatcatttttccacctattcaactgccgtacctataataatatcatacaataaagtacggcttctttccatgattttcaaaggttttcccctcttgatatgcgtttttaatatgagatttcacgatacggataagtaattcttctacagaaaatttacataaaaattctcgttctacaatatattgtgcaggtttttttttagtcaatgtatcagctcccttaatcaactatctattctcaacatacgcacataggcttatccaatatgcgtatttttcacaatgttacagaagcaaacagatggtattggaaagctttgttagtatctcaactattcccattcttgtgggcagaactgcaccatatcggtacggaaaggtgtgatttgttgcaggaatttgaaaagatttgaaaaaattttcggatacaaaaaagcccgcacaaaacatgaattttgtgcgagctactgggatagtgtatttaattgtagatagtatgctgttaaatcagatttgaatatatcgaattgtacttaaagcttaaaggcacattcatcactccatttttggtttggatgtttcaatgtaataaatatgttccttgttccactgttttaaacaaaaacaaaattcgataacagccaaagcaatattatatgtatgggatagaaaatataaaagagatatttacacttttttcctcgttgatgattgtatgatagtattagcggaagagcaagaaccataatccactgatactgaattgtaaatatattccctcctacatccataggagaaattccacctattatagacaatagatattccataccatgggaaagccctgttcctattatcggaattaattccttgattttccataaaataatgggaacaatattagtggacataaaaaacatatacacaacaacaaatatcatatacgacagaataagtcttttcttgttgtcataagctaaatacattataattcctaaaacaacaaaaataagtcccccttccgttgtaaacacacttcccaaaagagctggtatcaaatagaagcatattgtttccgtatacatattactaattgaactcagataaccacatactatacatacaataacttgataagcaatatataaacttagtacttttatccaggaaacagccttttggttttttcttatttctaagatttcacatatgcatgcaacgataaataatgttctaaagaaatttaattcaatttgtgtactcatttgaataacagccatcacaatacttgctaaatatagcctcaatatatacatccgcttagaactagtatactttacgccattaacaacaccaaaaataaaaataggtgcagcgattcgtcctatccaatgtaacggcaaagacattggcaaatcaggaaagaaataagctatatggtctaaaaacatagcaatcatagctattatttttaactgaaatatattcattaacaatactccttgattttattttaaaaatatgattgcaaattacgctcaaacggaatgccagttccgctactgcggaacggctattccatttttaacggtacgaagtaccgctattttttacagcttttgaatatgcttctttaatccatattttatcaggattattaggaatgtactcattattgagccatacgctgaaactcttgccagtcataaacttttcatctttatcgtgtaaagttttgttgtaactgagatagaaattgtagacgtatctacaagtgccgatagtcttgttaatcttgactttttgctcgactgtcggatttatttccgttttgaagctcttgaacaatttcctcatctctttctatcactttccattttgatattgaactcattctccagcatatcattttttcctcagcacttagttcggcggaaataaagcacccaggaacctatgacatatatattatataataatagctccatccaatgcaatagcccaaatgtcattaaaaagagagcgggccggcgaatgggaagttcgccggcccagatttacactaggagcaaagtttatactttgcggagataaaatatatttatagaaaaccaaatatttggtgatctatcattttgtttcgtggccattcctgttgtcgcggccacgctatagttctgatttgcttataccgctgccagcttctttccaagctcctcgcaggctgtctttgcatcatcgtccggtgcatcctggcagataacaccctcgccacctaccactgtagctccggccgctgtcattcgctctacccagtcacgcatccactcaccatcgccccatccgtatgaaccgaacagaccgattgtcttgcctgccacgcagccctcaagctctgtgacaaacggctccatctcgccctcctcaagtacctctgcacccattgcagggcatccaagtgcgaatgctgtctctgatttaagctcatctattgaagcactgcttacgaatacgatttctgcttcctttccggcatctgtgacgccctttgcaactgcctctgccattgctgctgtattgcctgactgtgaccaataaactacactgattttgctcattttaattcctcctataccgcaatatgctgcggttcttctttatatatttccagtatcagcctcatatctatatcctcggccaatagctgtatgacactttccttcgccttttcaaaatcctcaaacatcttctttttgagtggtacgttgcggtacaccttccagtatcctgaatacaggcagccgcatccgttatgctctataaagcctctcacatcctctatcggatacccaagcaaaagccccatctcatgcggaaactgcttgtgttcatcattcagatacgcttcgtagtgttttttgaatctaagtaatatcttgccgaatgaaaaatcctcatatcccgctttctttagtatatccaaagcctctaaattattcagatatgcttctaaaaggctcctgcggaataagaggaaggcggttttctcattccttgctgcgagcctaaaatgcgatatcccggaagctctcagaatcactctcatagcactctcatcagcgctgtctatcatgagcatatttgaaattctcgctcctgtaattagtggggcacactggagggcaagctgcatttccacactctttaaatccatgctcatagcaatctgaaatacttcctggcacattttggctcctttcgtgttagttatctctaacctgagttaaatatatcttacttatacctatatgtcaagtatttttttgccatttttacactttttattctcaattaattgcaacaaaaaacacactaagaatctttaattctcagtgtgctatccttattgccgttcttctttttatacaattcattaattcacttattataaaaattgtacctattgatatatcacagcctctcccccaatgctttgcaacgctttctgctaaaagcaatgccatacgctataatatcacatctgccttcattacgaagagcctcatcatatctcttttccttaatctgtgccatggcaatctcacaggccgtatcaagctcctttatattccttgcatacttcacctcgattacaattcctgcatccggattttccggcataatcattatgtcactaaaaccgtctcccgactcacgatttgacttaattagccagtccggattacttcctcgcagcaagccaagaagcagtccatggtagaagttctccttcatatcatcaggtgcctttgtatcaagtatgcttatcatacgtcccatcacaatattgagctgctttgcaatctttgtctcatccttatcaataattgcctttgataaaagcttcatagtatcattatcatttgccaccacactcttgaaccattcctgtatctgaaggataaatacctctctcacctctttgtttggaattacaagcttatatgcatagctttcgctatccggcagctttacatctcctgcctttgtaagatatcctgtggtgaacagcacactccacatattgtctatagtgctttctatttcatcataggtcaggtcgagtcgtatgctctttacaattgtctcgcctgcaataaggcgctctatttcatcctttgttgatgagtcagctttactgatgagccttctcaccagactgtttccactgctgtttatccaatatgtctgtggtcttatatcgctgtcatcacacagacggtccacatgattgatcacatcccatggacagtaaacatcagccttgccaaagtgatacccatcataccactcctttatatcattataatgcatggacatattataatcctcgagcagctttttcacttcattatccgtaaaaccaaactgctcgtcaaacctcgcatctgtaatagacatgaccctaaaattattaagacctgtaaaaatactctccttggatatgcgcaggcagcccgtaaggactgcaaactgcagaaattcattggttttaagggccattccaaaaattcccctgataagtgagaccatttcattatagtatccattctgaaatgccttgtccaaagggacatcatactcatctacaatgataattgctttacgtccaaagtgtgtaaacagcaattgcgacagaacctgcagactggatataaggagcttttcgtccatggcatattttccgtcattcactgaaataattgcattatagcgatttttatcattttcagaaagcccttcactatccttaagaaacttaaatcgctctgcttccctgctgataagctcaataatcctgtatcttgcctcatcaaatgatgtaccctcaacacttttcagtgaaagaaaaacgaccggatactttcccatatattcttcacaaagctctttattcccagaaatatacagaccatcgaacaacgatttatcagtaccaatctcaaaaaagctcttaagcatgctcatattgagagtttttccaaagcggcgcggtcttgtaaaaaaagtcacctcgctccagctttgtaatatctgctctatgagccttgtcttgtccacataataaaaatctgattcccgcagttttctgaaatcatcgattccgaccggtaacttcatcgtgttcatcataaaagcctccactaaaaaaatccactatactcattttagtatagcggatttttctaaaaattacaattcctataaaatcaggcttatgacacctgcactctatacatatttttgcggtcaatcgctccaatctcttcgagcgtattgatcatccgatacaccgtagcagtcccgatagagtgatctatctttgatgcccggtaataaatctctttgcagcttccgcactcgccctcgaggattacatcaagcaaaataagtctctgctttgtaatcctgcacccgctgtcctttagcttgccaacgattacctctttttgctctattgcttctttcgacatacatcctcctatcgttaccgatgccggcagatgcagcttaagcggcagatgagttctttccatgaaatgcccatcctgtgcttcatacacaccatgccgtggattaatgacagcccttgcaatggctgcagtccattccacactgcaggctcttgcctgctttctttgatttgattattgtcctgattacaagtgcaactatcactacgagaattgcaattacaatgatatcagccagcatgtcatcatctcctattcactacaaatgctactaattatactactgtgttatttcttttccttgaaaaatcctattattatctttacggcaagccccagcaggcatagaagaactatgactgctatgaggtctgctgtgttaaattccaaattgattctcatttaaacatctattacacgtttgatgccgcaaatgaagagctctttactgttgccttattagggtcttttctgaacaataagtataatacacctgcaaggagtacaaatgcaactactgtccagaagttgaaggctacctcacctatgcaaagtcccacaatctggtagaacataagtgttacacagtaagccgatacgttctggaaaatgattgtaaaccagaagaacttacgattgttaagctcttttgcggttgttgagatagctgcaagacatggtgagtcaaacaggttgaacagcaagaatgatactgctaccattgttgttgggaagaatgctgcaaactgatcatgcatgcttactgcatactcctctacctctccaagtcctgagagcacacccattgttgaaacgataccctcttttgccacaaagcctgagagtgatgatgcaactgcctgccaagtatcgaatccaagtggcgcaaagataactgcgattgcagatccgattactgcaagtaagctgttttctgtgtcaacaagtccgaatgcgccatcctggatgccgaagcttgaaaggaaccacataactgcacagcagaggaagaggattgttccggccttcttgaggaatgcccatactctctcccatacgtgtaacaacacaccctttactgaagggacatgatactgtgggagctccattacgaacggtgcaggctctcctgcaaatgctcttgttttctttaaaatgatacagtagatgattgtgaggccgattcctgcaaagtacataagaggtgccatccaccagcagccgtcacccatgataaagcctgcgataagtgcgataaccggaagctttgctccacatgggatatttgttactgtcatcattgtcatacgacggtctttttcgttctcgatagtacgtgttgccatgattcccggaacaccacatcctgatccgataaggaatgggatgaaggactttcctgaaagaccgaatctacggaagattctgtccatgatgaaagcaactcgtgccatgtatccgcaatcctcaaggattgagaggaataagaatacgatagccatctgtggtgcaaatccgataggtgcaccaagacctccgatgataccgtcaactacaagtgatacgagccagtctgagcagcctacattttccataaatgtctgtactgccggctgaatccacgcgccaaagagtgtgtcgtttgtccagtctgttacaattccaccgagtgatgatactgcaacatagtatacagcccacatgataagtgcgaaaataggcagtgccaaaaatctgtttgtaacaatcttatcaattttgtctgatactgtctcttttccggcgcgtgccttctttacgcatgagccgatgattgaagatatgtactgatatctctcgtttgtgatgatactctctgtgtcatcatcgtatttgtcctcgagagctttaatctctgcgtctacgtttggagcactctttaatacctcagaaatctttgaatcacgctctaaaagcttgattgcaaagaatctcttctgattctctgctactgcaagaccaagcttatcctcgatgcctgcgattgtgctctccacatcatctgcgaagtgatgtactcgctgaacggatttacctgacttagcaatctggattgccttctctgcggtctccttgattcctgtcttctttaaagctgaaatctcaacaacctcacagccgagcttctcgccgagtgccttgatattgattttgtctccgtttttccttacgatgtccatcatattgacagccataagtaccggaatgccaagctcgataatctgtgttgtcagatacagattacgctcgatatttgttccgtccacgatattgataatcgcatccggctgctctccgattaagtaatttcttgcaacaacctcctcgagagtatatggagaaagtgagtaaatacccggtaaatccaccaggtctacatccttgtgaccgataagctttccctcttttttctcaactgtaacaccaggccagttaccaacatactgattggcacctgttaaggcattgaacagtgttgtttttccgcagttcgggtttcctgcgagagcaatttttactgccatgttttaatctccttatttttgtttgctcattctgcctatagtttgtatttactaacctatgggcaaaaaaatttactctacttctatcatagaggcatcgtccttacgaagtgatagctcatagcctctcactgtcacctctaccggatcgccaagcggtgccaccttgcggataaatatctcaacacccttagtaattcccatatccatgatacgtctcttgactgcaccctggcctgtgagcttgacaaccttgactgtctcgcctactttggcttgctttaatgtcttcatgctgactactccttttttaattttattgttgtttaaaaaatttatataaacgtttgcataatatcatatacaaagtcgtttaaatcttaaatgattacagcttatacagcacattgctgcatgtgttgtatgtattatatatgtcatacatgctatatccatgcctgttacattgtttatcagaccatgatcttatttgccatgtccttgccgattgctactctggcgccctttacattgactatcatattgccggctatctctgagatgacagtcacctctccgcctactacaaagcccagcttctcaaggaaagatctcacctcttcctttccgccgattttcttgattatctgtgcctccccggctccactcattgataatggcatcatatttacctcttttcacgtcttttcttcacgactttaatgataaaaaacatcatttggtagctcttacggctgttagtataccctaacgtcgcttagatgtcaataatattttttagatttttcttacttttttcagttgtggctaatagaatgcgccccagacaccaagtgtccggggcgcgtaccaacctcagtcaaaaaagtatattataatattatattacgtagaaccagctcggatccgtctccatctcgctggccacaagctcctttcgctctcctgttctgatagaaagctcctggtttttgatgctcacacgagcccccggctcgatagatgaagtaataaatgcattacttccgatgacagcacctcttccgatgacagtctcaccaccaagtatcgaagctccggcatagatgatgacattatcctcaatagtaggatgtctcttcacgccctttagcttctgaccgcctctggtagaaagtgctccgatagtcacaccctgatataccttgacattgtcaccgataatagtggtctcacctaccacgatgcccgttccgtggtctataaagaaattcttgccaatagtggcacccggatggatatctataccggttttgctgtgtgcatgctctgtcatcatacgcgggatgagcggtactccaagcagatgcagctcgtgggctatacggtttgtagtgattgcaagcagtccaggatagcaaaggataatctcattgtaattgtaggctgcagggtctccgtcaaaaaacgcagccacatcagtctccaccaaagctctgatttttggaatccttttaaagaaatcattgctgattttctcagacatattgacaagctcgtgatgtgataagctcctgtatttaggattctgcggcagggcaagcaccacctgcttgcgcagattgtacatgatatcctccaaaagaacagcaatctggctgtccaggttgtaatatctgaagctcgtgcccttgaaatagcccggatacattatcttaataagctttgagagcagatcacaaacagcctccttgtctggctgtgaaaatagtgcctgctgatttatgattttgtcatcatgataatcgtcaagtatctgtgatacaagcccttctatcatttctttattattatccatatattcgaagcctccgaatttactatttataatatttttttgcctccatacgctcctcccatgtgcggtttattataccgcctatgaaaagcacatacatgcaaccatataaccataccattataagcgcaatagtggtcattgtgccataaaatgaagaataattattgtatttatccacgtacacagaaaagattcccgaaaaaatcatccatgcaacagccgcaaataccgctcccggcagctgatactttgccctacgcttcttgtttggcagaaacacataaatcacccagaaaaataaaataagcaccggcaggcagattaccagacgataatcgaccacactgcctattatacttccaattatatgatgaacattcgaaaaatacatcttcctgagcatatttccaaacaccatgacacccagtaaaaaaatgagcgccagtgcaaaaacgatactgtaaagcaccgaatatatgcgccgcaaaataaaatttctgttttccttcacatggtacatatcatcaagcccaagctgaaacgaaataaaagcctttgagcttaagtacacggctgtaatcatcgtaatagaaagcctacctgtgccgctggcatacacctcacttgccagatccttcatgatgtcgccaaacgactcaggaataaatgagctcgcccacatcaaaaaatcagcctctgtaagcggtgtccagctcagcagcgaaaagaaaaacaataaaaacgggaaaaacgacagcatcaaaaagaaggctgcctgccctgcgtatgcagaaatagagctctctgaaaaattggtcacaaaatcaaaggctgtcacaatgatatcccatcttctgctgtatttcctcgcactttttccttcgatgttagattctttacaatcaccacctacggccttacatttctccgttttgatttccggtgttttactatctaaatacggtctactttgctttgtcatctgccttcttctggaatttctcctcaaatactataaaacgctcatgagtaccctcaccaatgagtcctgcctcatcaaaagcctttacagaaaaagtgagcgctctaccatccaccttcacaagctcagactcacaggtcaccttcatgccaaccggtgtagccgaaacatgcttaatatcaagcgcagtaccgacagtaccacttccctcctctagctcagacgcaacactctcaaaagctgtattttccatcagcgcaatcatagccggagtagcaaacacatccatcgtgccgcttcccatagccttcgctgtcttatccaaagtcactgtaatctctttcttacctttaatacctgtctgtaacatatcagtctccttatatatagtgcgggtcactaaggtatacatcgaattgcatgcaagcatgcatcgatgataccttttgaccctttaatcatattataaaataaatcctagcatttttacgccacaatgtccagtgaaaaataagtttataaacttttcacaattccaaaaatgcccaatccatgcggttttctgttattttgttagcactcactatttttgagtgctaattttctattgacttttccgataatgcgaactattattttattatgcttataaaacaagctgatttactgcaaatattaaatgacctacactcgcggaaacaagctaaattgcgggtagcagacagttgttgtgaagataaaatatgaactgccacagggttccattaccggacaaagtggcacaaccaaaagcatgccgcataactatccatacaaaatcctgtggctgacttcatattttctctgaggaattattggctgctacatcgcaacctcacagcccatagccgcggtgtaaaacatttaactaaatctacattcgcggaaataagctaatattgcgggtaacggacaattgttccgaagataaaatatgaactgccacagggttccattaccggacaaagcggcacaaccaaaattatgccgcataactatccatacaaaatcctgtggctgacttcatattttctctaaagaattactggctgctacaccgcaacctcacagcccataaccgcggcgtaaataaaaacaaggagtgtgtaaaaatgacagaaaaacacggcaatctttcaattgacagcgacaacctgttccctattataaagaaatggttatattcagaccacgatatcttctatcgtgagctcatctcaaacggctgcgatgccatcactaagctcaaaaagctcgacatgatgggggaatattcccttcctgcagactacaagggcaagattcaggtgctcgtaaaccctgacgaaaaaacaataaaaattatagataatggtcttggtatgacagctgatgaggttgaggaatacataagccgtatagctttttcaggtgctacagacttcatcgagaaatacaaggacaagtcaaatgatgaccagattatcggtcatttcggtctcggcttctactcagcattcatggtagccgacgaggtaacaatcgatactctctcttataaagagggctctacccctgtacactggtcatgtgacggtggcacagagtacaacatggaggatggcgacatggacgacgtcggaacagagattactctctacttaaacgacgactgtctcgagttcgcaaacgagtaccgcgcacgtgaggttatcgagaagtactgttctttcatgcctactgagatttaccttgcaaaggaaaatgctcctgaggagtacgaaacaatagacaaggctgacaagcgtgacactgacactgttatcgaggaaatccatgaggacgcaaagtacgaggaaaaagaaaatgacaagggcgagaaggagcaggtagaggtatctcctgcaaaggatcagctcaaaatcgttaagcgccctgttccgctcaatgatacaaccccactctggaccaagagcccgaatgagtgtaccgacgaggaatacaaggagttttacagaaaggtattcttagactacaaggagcctcttttctggattcacctgaatatggactatcctttcaacttaaagggtatcctctacttccctaagatcaacacagagtacgactcaattgagggaactatcaagctttacaacaaccaggtatttatcgcagacaatatcaaggaggtcattcctgagtttttgatgctccttaagggtgttatcgattgtcctgatttaccgcttaacgtatcacgttctgctctccagaatgatggcttcgtaaagaagatttctgagtacatcaccaagaaagtagctgacaagctcatcggtatgtgcaagacagataaggaagcctatgagaaatactgggatgacatcagcccattcatcaagtttggctgcttaaaggacgagaagttctgcgacaagataaacgactatattcttttcaaggatatcaatgacaagtatcagactcttcctgagctgctcgcacctgttgcggaagatgaaaaaacagatgcggaaagtgccgatgcttctgatgatacaaagaaagctgacaatactgatgaaaacaaggagcctgagaaaaatacagtttactatgtcacagatgtagtacagcagggtcagtatatcaagctgttcaaggaacagggcatgaacgctgttattcttgaccacaatatcgatacctcgttcatcacacagcttgagcagagaaatgaccactacaagttcatgagaatagatgccgacctcacagagtctctcaaggatgaatccggcgcagacctcacagaggcaaccactactctctcagaggtattcaaaaaggctttgaacaatgacaagctcactgtaaaggtagaaaaccttaagaacgcagatgtagcatctgtgctcacactctcagagcagggcagacgtatgcaggatatgatgaagatgtacgcagccggaggcatgggtggaatggatccaagcatgtttgctgctgaccagacactcacattaaatgccaacaacgagcttgtgaagtacatcttagacaataaggattctgagcacgttccaatgtttgctgagcagctttacgaccttgcaatgctttctaatcagccgctttcagttgaccagatgactaaatttgtaaagagaagtaatgatatcatgcttcttctcacaaagtaattttactgttaacatcacataaaaaagctgtacactatgcaggtttcatagacctgcatgtgtacagctttttattaattatttgtattcgttctattattatacgttattatttatgccattttatgtgacacttctttagctttatttagtcatctcgctcttaccggctctcttaaacaaaaagttcataaacacagccgacaccactccaagcaaagctcccgcaagtacatccgttgggaaatgcatgaagttgtacatgcgtgaaaacgctataagtaccgcaagtacaatcgccggtattcccattctcttatctataagcatcagtgtcactgccgctgttatgccgtttaacgtgtgtcccgaaggaaatgatgagtcaaacggtatctttacaataagactgacagtctcatctatctgacatggtctcaatctgtcgaccatattttttattatcagattgcccactataaagctcaaaagctctgccgaaagcatctgcatgcctccacggcggtatttttttgaaatacaaagcactacacctatcacaatccacaatgcgcctgcatttccgagggtggataaaaacgccattagcttgtctaaaaacggtgttctgatgctctgaattgcatacaggatatcaaattcccagtccatattatatgctcctgtctattattaattattatcggcctgttcaattgtcggcctgaaagtatttattgtacacagtaaaaaatgagcttgttttcacatccttttcatcctttatactgattgaatcccacaggtcattgtttaaactaaaccctgctttttttacaaagtgctcgtagtcatcattaaactgctcctgttgtctcttttgcagtatagtgaccttgttctgctctgttttttcccggtccagcttggatatacacttgatgaaatagtagccgtcatctgtgcttatcatatcagatgtctctccatcgccaagctcaaatgctacagcctcaacctcctgtggcagagttccctttgcagcatacagctctgtctggctgtcctcactgctgcctgatgcaactgctgcaaaatcttcctttgacaaaagcttctggctcacagcatctgcgctctccttgctctttacaaagattttctgtatatggataactcttgcatcctcatcactcacctctgtatcaacgcccttcgatagggaattgtacagcttttgcgcaatcgcataatgctcgtatgcgctctcaatgtctgataaatcagcctttgtgaatttcttttcagcttcgtttaatgagtcatagtattcctttgcagcctttgacacactactcttctccttgtctgtaagtgtaatcttcttctgctttgcaattgaaaccatgcagtatatgcgcgtcagctcatcaacagtgacatccctgatatatttttccacgttcgacgcatcatctgtctcaagcaggtttacttcatacatagtgccatacagatttttgtaattggctaaatatatgagcgcctccgtcttatcgcacttcatattgtccacggaaaaaactgtatggctgttcgtggtatttatatcaagcactatctccttgccgccaatactgcagccggtgagaagtgtcgctgatgcaagcagcatacacatcgttttcttaaaatacttcatacctgctatccttccacaacaaggaatctgccgtccgcaatggcaaagacctcactctggtccataagctcatcatctgacatacccgaaatgtctgagcctgcctcatcaaaataatctcttacttcttttatattcttacataccacagccatgcagtcctctaaaaattcctctgcagcctccggagtatctgcgacctcctcactaaaaagctgtgtctgtttctttaaaaatgtgtctaaaacctcttcatcgtattcgtacatattgcattcctccatgtaaattatctcttttctttggctttatatacagctgttcatacagcaattatgtctgatatattaatgtattgtatatttttgtaccgcctgttagacattatataatagattgctgtgacatgccactattttttatattcacgacaggtaacaattgtctgctgtaaacggaatgaatatatgagcctctcatccgcctgtatgcttttcccatctgtagaaaaaatccttccaagtgcatcagcatacagttttaactgtgtgctgtatctgtcgataagctctttagccgcgtttacgctgtctgtcttgtaatcaagcagcactattttatcatcctccagccagaatacatcaataattccctgaaccaatactccctcatagtccatcacaaaaggcttctctttatataaatcgcctctcttatccgcctgtgccatacgcgctgccacatctgatgatataaactgctctataagctttggtctggtcagcctgtacatgtcatctgtgataagccccttttttagcatttcatccatgcttttcttcacaaatgcactgactgccacatggtcttttgtatctatatcacacagtctcttgaaatccagacactccatgacacggtgcactgcagttccgcgcagtgctccctgattcacacctgctgcatttttaggttctttgctttcatttgaagcatcgcctgcctcatcatccctagcaaagtccggcacatacgtctccttctcctccaaaaggaatttaggacgctctgcctccctctctgtgctgtcgtacttttcaaccatagagtcatgcttcagctcagataccgaatatttgctttttttagttatatcagaagcatatacatactcaaaatcaaattcctctgcgagctctttggcttttgtttcatccgctgcacttatgtgcccaataagctgcgcttttgatatatcgtttgccgccatatccatcgcagttcgtgcagcgaactctgttgcatcgactgtggataccgtatacttatccgggtacgacagcatggcaggtataatccagtccaggtaacaccctgctccctccctttgtccaaagcttattggctggttcgcatttacattgcctctatacttctcaaaggatttttgggcatttgaaagtccccctgtcaggataatcttttccttcgccctggtgagcgctacatatagcacacgcagctcctctcccagattttcccttttaatgcggcttactatctcatttctgattagtgatggtcgctttgtccttgggctttttgttttttccacaaggccaagcccaagcttttcatgtatcaccaggtctgattttgtgtcctgcgtgttaaagcccttgccaaggccggaaacaaacactacaggaaactcaagacccttactcttatggattgtcataatgcgcaccacatcgtcattctcccctgcggtatcggcctctccgtagtctatctcgtatttctgctgtatatctatgtacctgacaaagtgaaacagccccttgtagctggtcttttcataggctgcggccatctcaatcagcatatctatattctgtctgcgccgttttcctgccggcatggccgatgcatacctgtaaaagcctgtctcatcaagcatcatgtacaaaagctcatggattggcgtatcagctacagcacctcttagtctctcaaataccaaagcgaaggctttaagcttctcgtcctcatagccattctcacctgccatggcgctaagtgcagcctgtgcaaagcttacgcccttaaaggcagacctaatctgtgccagttcctcatcatccatgcccacgatcggcgaagcaagcactgctgccatcggaatatcctgcagcggattgtcgagtatgcgaagcatggacagaatcacctgtatctcatacgatgaaaaatagcctgtattcgactctacatgtgccggaatatcacagtcctttaatactgctgtcactgtattgccccaggttgcaacacttctcgaaagtatcactatatccctgtactgcacggctcttagctgccctgtctttttatcggtcaccatgccgttttccatcagactcctgatacggtttgcaatcaaaagcgcctctatctgcaccttatctccatcctcatcctctataatttcagacagctcatcatccttgtagtcaacaagcaaaagctcaggacgcatagtctcctttggatagcttgcaccgggatacagtgccgcatcgtcatcatactgcacattgcccaaatctgctgccataattttgtagaatatgtcgttagtaaagtctaacacttcattcctgcttctgaaatttttatgcaggtctattctctgatgtgcactgtcatctgatgtatatgtgttgtatttttccataaacagctcagggcgcgccattcgaaacctgtatatgctctgctttacatctcccaccataaacatgttgccgactccctgatgctctcttgaaatagcggtaagtatatcctcctgcacctggtttgagtcctgatactcgtcaatcatgatttcctcaaaatgttttgaaaactcacgcgctgtctctgtgggctttagtgtctgttcatccaccagtatacgaagcgcaaagtgctctatatcagaaaaatcaaatactctttttcttgtctttacagcctccatcgcatcataaaactcgagtgagagccttatcagctctttaacaaatggtctttgacgctccagctgctcatacataagctcaattgacatgccaaagtacttctgctttattccgtctaccttcttcttgccagcatcgcgcatgcttttcacgcgctcctttttcttctcgtctccgtcaaatttcctgatgacagcaattctgccaaaggatattttgtttaagaactcctgcatgccgacatagcctgtcacatcagccattccatcaaacaatgctatatcctctgaaagtgtaagcgcatacttttcaagcccgggtgtagccgatgccaggtctttcgccattgtaagatcctgaacagcctcctccaaaagcaccctgctgtaatccactatctccttaatgatctctgagtcctcaagctgtttagctgactttatatcatagagcctcaggaggctgttcatccactttctcggccatgatgagctgcccgccttatagtagatatcctccaccatctgcctgacgtcagagtcatttctccccttgctgtaggtatctataaggttgataaatgcctcgttgtcttctcttgcataattgtcctcaaatacctgtgccaaagcatcctttagcataagcttaagctctgccttgtcaccgattctgaaatcaggatccagattaagctgtgcgaaattattctgcaccacaaacagacaaaacgaatcgattgtagtgatgagcgcattgtgaaccagtgtcgactgcctctgcaggttctcatcgtccggcttttgctccttcaagctgtctatcgcacggctgacacgctccctcatctcagcagctgcagccttggtaaacgtcaccacaagcatcctgtcgatatccaccggcggattatccacacatattctgtttactatacgctcaacgagtacagctgtctttcctgagcccgctgccgccgatacaagtatatccctgtctcttaaatctataacctttttctgttcactggtccatttaacatccatattatgtctcccgattatggctttatattattatctccatagcatgctttatgctctgccgctgcaatctgtgtacgcattttatcaagtacatcttccttattgtcaccgttaaagcttctttcgctaaagcccggtatccttgaatcatacctgcatatggcctgaaaagtgcaatatgcgcagctgtctattttcttgttcttgataggattgacgtcaacatttccatcgtatatttctcttcctatctcgcgaagcttctctcgcgcaaaccttgttatcacatcaaactcttcggcgtttgccacctttgagcctgcagccggtgtctgatccttttttaaggtgacagggattacgtcagagcttttctcaaagtccctgtccatgcctctgtatgccttttcgtccgagttgataagcccgtcaggcttgagcttctttaatatcatctgattgatttcttcctcagacagctcagtgcccggtgtcacatcctttaaatcaattacaggatcgtcgatgtgatagtacagcataccgcccggctccacacttacctgctttagcgcctctttcttttgttccatgacagcgtccatgtacactgcaagctgaagctgcgtgccatagtacagcttcaccaggtcaaaaactgtatttcccgacttgtaatccagtaccttcacaaaaagcctgccctcatccgtatatgtgtcagtcctgtccacgcgtccctttatatcaaccgtcacatcattcgccatatcaaggctctcgtaaaaggaaaactcaaacctctcaggcacaaagctgcctcttcgtatctgggttgtaagtgcccatactgtctgcttaaagaccgccttcatatgtgatattgaatgttggctttctgctgtatcaaatatgccaaagcctgcatactcatcaatcacctcatttattgcttccatcgcaagctcatccctttttgcatctgtcacgctaaaccagtcagtactctccctatcaagcttcttactgtatctttccagtgcttcatggtatatattacccatatcaagggatgtaaagccgctctcctcacgctctgtaagcctcaatccataatttaaaaaatgcgcatatgcacacctggcaaactgctcaaagcgcgtgatgctgccctccatgtgtctgccgtatatgcttcttgccacatttcggctgatcggatcctttgaataatgctcaaaccttgcatttatgagcctctccacggaatttttttgagtaaattctttatcgtctacttcattaccgtcccctgcatcactgactgatgcgtcatagagcatcaccgctgctgcaatctcgcaccatctgtcatccacctcatttgacagcagataatccagggcactctgcctgcttgatatatccaaaagctgttctacatcctctgtctcagtcacgacaagctccggaaacatcccctttaatatacctatgaggtacgatggctgggcagcctttttttcactgtcaagtctcgtatagctgatataaagctccatggatggttttgtcatattcagatacagataaaacctctgtataaatgcctgctcccttgccccaggcgcaagctctatatccagctccttaagtgcctctctctcatactgggatataatgcctcctcttcctgccgcctttggaacaatcccatcgtttacgcctgcaaaaaacatgacctttatgttggtcagacgcgttctctcaatatctccgatggtcacagtgtcgtatcccggcggtatgactgctacatctgccgcatccagtcctgcatccagtatctgtgtaaattcctctgcatccatgcattcatcgcccagcaccgccacatatttttcaaatagctgcatgactattttgtatatctgtccatattcctttgatgcggtctggtcccctgcatcaagcagtgcctgctccttttttgcaagcttatcaggtatatcaagcaaaactatcagcttatatatagctagcacatagtcctttaccgttgactttttattggaaaacacctgatataccggctttagaagctccattatatattccctgctttggtttaaaagctcaaggtcatagcctgccttatgctttggcagcctgacccactttttgtcccatgcgcttttacctcttactccacaggcgagcacgtagttttcaagtacatctatttcactgtccaatagctcactaaagccgcaccgcaaaaatctgaacaccgcatctgccgagaaattttgtgccgcaatatcgggtattgacctgataaactcaataaacggatggaaaagtatctcctgtgtggcatcgataaagtaaggaatattgtatttgtcaaatatttcacgcacataacctgcatatatattcacctctcctgtgactatagcaatatctcggtaacgtaggttttcgttccttacaagctcattaattcttctggctatctttgtcagctcctgcttcgggtcacgcagacagtctatatgaatgtgctttggtacttttttaaaggagcaccttcgttttctgaaaagctgctgttccataaagcttagctcttcgttttctgcaagccggtagtttttatcaaggataataggttcctcgacttctatgccataaaacgctgccatttcggtgagtgatttcactgtcctttttggcatgtcaaacagctcctgcatgcctctgctcttaaagatatcctcacgacagtctattgtgagcgttacatatattttctttgaaatgacaaagagctttttgataagctggttctgtataggtgtaaatccagtaaattcatcaaatgcaatgactgaatttctaagaattgcagactcctccgccacattgctaagcacattaagtatttcctctgcagtgatatatttgtcctgcataaacttctcaaatgcttcgtatagcacgagcacatccttaagcttatctgaaagtgtatccgatagcatgcctgaggcaatatatcttccgagctcctcaggtgatatattgtactgcacaagctccgaaagcagtgactttacctcacttatatagccgatgcggtttaagtttctgcctattacgccaagcttatccgcctcctgtgccgcaagctttctgagtacaaggttcttacctgtctcctcaagcaccgtgagatttgtgattccaagctcatcaaacactctgtaggctaagcgcttaaagcttagcacatctatattcatgatagctttattctccgacaaatctacaagctgtctctgcgtctgcattgtaaactgctcaggcactattacaagataattgtcccttgggtttgcctttgcctctttcactatcctgttaaagagatattttgtttttccgtttcctgaattacctgtgataaactgtaatgacataaaaagactccatgattaactactgtgtaaaatgtatactgtaattatatcatgaagtcccctattattgaattacttattgtgtttcaattcagcttaataaccgctataccttgtgattagtgatggaaaagtctgattcctgtaaagctcatcaccataccgtacttattacatgtatcaataacatggtcatctctcacagaaccacccggctgggctacatacttcacgccactcttgtgagcacgctcaatgttgtcaccaaatgggaagaatgcatcagatccaagtgctacatctgtattcttgtcaagccaagctctcttctcctctgctgtaaatacgtccggctttaccttgaagaacttctgccactcgccctctgcaagcacatccatataatcctcaccgatataaagatcaatagtgttgtcgcggtctgcacgtctgataccatccacgaactgaagtccaagcacctgtggagactgacgaagccaccagttgtctgcctttgagcctgcaagtctggtacagtggatacgagactgctggcctgctccgataccgattgcctggccaccctttacatagcatacagagttggactgtgtatactttaaagtaatcatagatattgccagatcgatcttagcctgctctgtgagctccttgttctctgtcacgatatttgagaagaaatcatcatcaatatgaagctcgtttctgccctgctcaaatgtgatgccaaatacatcctttctctcgataggtgccggctcatatgacgggtcaatctcaataacacagtaattgccttttttcttagcctttaaaatctcaagagcctcgtctgtgtagcccggagcaataacaccgtctgatacctctctcttgattacaagtgcagtgctcttgtcacatacatctgaaagtgaaataaaatcaccaaatgatgacattctgtcagcacctcttgctctgatatatgcatttgcaagtggtgtaaactcaatatccatatcgtcaacccagtaaatctttttctccacatctgaaagtggctgtcctactgctgcacctgcaggtgaaacatgcttgaaggatgttgctgctggaagacctgttgccttcttaagctctcttacaagctgccatccgttaaaggcatcaaggaagttgatatatccggctctgccgttaagcacttttataggaagctctccctccttcataaatattctggctggtttctgatttggattgcatccgtattttaattcgtattcctgcatttttctgttctcctgtttttatctgcttatcttgtatatttgaccgtttatatagtgttttatttgtttttgtttacgattctgctctcatactcgcctgttgcgatatcaatatatctgacaaaaagtgataccttattgtcctcgttaaggttctcccacaccatatcggtaaactcatcgatatctccgtcgatgtctacccatgtaggctcaccctcaaagcttggcagcggattgccatcacccatatatgtatggatgaaatgtccctctcccgcaaccggtgctgagtatgcaaatgtatatctgttgcatgcatcaggattgccgttgttgctctttaagattgacatagcatagttgaactcaccattgtcaatatgcatgattcctgaaattctaggtgtatagttaggagcgtcaggctcaaactctcttgtccttaaggcctgctcaaatgtctgctgcttgtccatcagctcatagatagtatctgtctggtcaccgtttgtgacaattgtcttgttgccgagcactcttacaggtgcgtaaatgataagacttggatcctcaagctttgaagggtcaaatgcctgtgttctgatgccctcgccatcctctacaaatactctgttgcggctgttttcgcttctgcccatgataaagtatgctgttacagccttcttaccatcctttgtgcggccgattacgatacctctgccagggtatgttgtgcttgataattcctttgctaatgatactctttccatgtcatcctccatgttttctgataatgtggtctgcatccccaaattactcgggcctgccggaataaaaaagaccgtctgaacacacataataatataaagctctgcaggaaacttatataaatgtgcgcccagacggtcggcaatcaactgttatactccatgtggttatccacttccgtcagtcatataactgtctttatttaatcatgtatttttgtcattgtcaagtaccactttaaaataagcatgcacttataagttattcttataagtacatgcttgtaaacaatgccattatttactaatttttaaagctgtgaataggtgccgggattcttcctccacggtttacaaatgcatcacaagagaatctgtttaccggcataaccggtgcacttccaaggagtcctccgatttctaccacatcacctacatcctttccaattgctggaagcagtctgcaggctgttgtcttttggtttatcataccgatagccatctcatctgcgataattcctgaaattgtggtggcctttgtatcgcccgggattgcaatcatgtcaagtcccactgagcacacacaggtcatagcctcaagcttttcgagagtgagtgcaccatcgtttacggcatctatcattccctgatcctctgatacaggaataaaggcacctgagagtccgccgacatatgaggatgccatgataccgccctttttcacctgatcgtttaagagtgcaagtgcagctgttgttcccggagctccggctctctctaagcctatctcacagagaatatcggctacagagtctccgatagccggtgtaggtgcaagtgagaggtctatgattccaaatggcactccaagcttctttgaagcttcctttgccacaagctgtcctactcgtgtaaccttgaaggctgtcttcttgattgtctcacagagcacctcaaagttctcgcctcttaccttttcaagagctgtctttactactcccggtccgctgacacctacattgatgatggcatctgcctctgtcacaccatggaaggctcctgccataaacggattatcatcaggagcgttgcagaatactacaaacttggcacagcctgatacaggaaggtgctttgtcacctctgctgtctcctttatcatctcgccaatcagctttactgcatccatgttgattccggtttttgtagagccaacatttacagagctgcataccaggtctgtctcaagcattgcctgagggatggatttgattaaaagctcatccgcctttgtcatgccctttgacacaagtgctgagtatccaccgatgaagttgacacctacctctttggcagctctgtcaagagtctttgctatggtaacaaaatcctctgagctcttgcaggccgcaccgccgacaagggcgataggtgtaactgaaatacgtttgtttacgatagggatacagtagttgttctctatctcttttcctgttgatacaagattctttgcaagtgttgtaatcttgttgtagatattctcatttacctttgcaaggtctgagtctatacagtcgagcaggctgataccgagtgtgattgtacgcacgtcaagattttccttctccaccatgtcattggtctcaattacttcaccaatatttatcattttgctgttctcctttaactgtgtatgacatttttatgctaaactagattcgatgcatcatctcaaagatttcttccttctgacactttattgttacaccaatttcttctccaagtgcatcaagctggtcagaaatctctgcaaatgaagctgtagcatttgccatatccacaatcatcatcatgttgaaataacctgaaacgatagtctgtgagatatcaagcacgtttacactgccctctgacagatatgtacatacctttgcgatgattcctactgtgtcttttccgacaactgtgatgattactttgttctttgtgttatccataacaacttattctcctgttctcttattctacggctatgcggtctgatgccctgtctctcttagccacatacatagggaaatcacttgccttatatggattgtctcccattgtgacctcaagcctgacggcttcatacgccagcttttcgtagttgttttctttactaaggtgtcccagtattactgagccaaatttatcatgaagaagctcgcataacaactgcccgcttctctcattcgacaaatgtccgctgttacccatgattctgcgcttgagcggatacggatatgccccagtctggagcatatttatatcatgattggcttcaagcagcagcccatccaggttctgaagctttgaaaccagtgtgtcatcatacgtgccaaggtctgtcacgaccgccatcgcatgattttcgtttttaaatctgtacgcaacaggatcagccgcatcgtgtgatatgtgaagcggctcaaactctatatcgcctattgtaaaatcgacgcctgcctcaataggatgaaacagctcatcatctatatttccaacggatttggtacattttatggccccgattgtggcctttgttgcataaatcggaatatgatagcgtcttgccatgacaccaagccctgcgatatggtctatatgctcatgtgtcacgagaatgccctgcatatctgtggccgtcatatcaaattcattcagtccgttttctattttcttaccgctgatgcctgcgtctatgagcacatgacaatcatccgtacccacacatatacagtttccactgctgccgctggcaatgctgcataattctaacatgttaattctctttccagtataattctattttgtctccctcatgaagctcctcggaaaactgggcatccctgccatttattacagtggctattgccctgccctttcctgcctgtaaatcaaatgagatatgggtaaatatatcgacaaatatatatgtatccttgccggacagctctacaggctcaccgtttacaataactgtaactgtattttctgatgagtcttcttcgtgtatttcttcctgtatatcattttttggcaattcattttccggcaattcgttttccggcacagcagatgcttcagcttctttagcaaactcatcatgcagctcatcgagcacctgattcatcatctgctctgatgttctggtcgctgtgttgtctgactctgtgctgtttgcaccctgctcagctaagaccgaagcatcatctgaatcagactcttgtgtgtcattataattgttattgtcgattcttgcaacaccatattcatctgttttccactcaacagaaaaattttcatatacaagagtgtcgagatcagcctcttcattgtttacaaatatcatctggtctgtgtcaataacgagatccataaactgcgcaatctgacgcactgtatagtaatttcttgtctcaatcacatcgttttccctgatgctgtaatcctccggctcaagccttccgtttacctggacaaaccttggacatgatacttttctgccatttatgacaaatgtaatgacagaatgattgtactcatcaagctgcgatatcttatactctgctgcctctcctgctgtggacggctcgatgactatctcactgtttggctcaagcggtgtgttgatgcttgctggctttccgttcatggtcaccactgcgccctctcctgcctcgcctcttacaagccttgccacaccgtttaccgtaaagtttatcggggtgccgcgctttggaaacagctcatcgtttggaaatcccgcctgaagcgccgcatcgactattgtaagcctgttattgtcatatagctttattctctcaccgttgaatctgaccatgataaaattatttctctggtcataataattcagacatataccaattggagtgacaagaagcggatccttcttaatatcctcctgctcaaatgtcacatcgccaagcacttcctcacctcttagagcgactctttcctccggcaggtctaggtcttccgcaagcttttccgtgaagccgtgtatcttgcctccacctccgactacaaagctggcactcactgttttgtcaccgtttagctctctgattttagccgatacctcttgtgcaatattatcaacaacaggtgctgccacatcccagacatcctgtgcaggaattgtgtgctcgatgctcatgatatccttgtatgtaaccgtatcacttgtcgtagactgaagcttgatgctctccgccatattgaaatccacgaggaaatgctgcacaataacttctgtcatctcatctcctgcatgcggtatcatgccataggctatgatacttccatctcttgtgatcgagatatcactcgttccggctcccacatcgacaagtgcgatattaagcatacgatagttctccggaattgccacattgatagcggcgataggctccaatgtcatattggcaacactaagccctgcctgtcccactgccgcataaagtccatccaccacatcctccggcagaaatgtaactatgatatcctcgcctattttgtttgccttatgaccttcaaggctgataaacacctcattattcaaaaaaaatttgactgtagaatatcccacacagtaaaacttatagcttgtatcgttaacctccttgagttcctcctgtgctttttctatgccaagcaggttaagcgtatggacatcctcgccggtcaccacagactcctgcgcatactcatactccacatgcgtcgtgacagtctttaatactcgtcctgcggctgctatacacacctcttcaagtggctgtcctgtctgtttttcaagctcgtcctttacttccttaatggtttttgccaccctgcctatatcatgtatctgaccgtcaagcatcgctctggtctcatgctccctgacatactgtgctgtaaccacaaattccttgtcatcagtctgatagccgacagttcctacaacatttcttgtaccaatatccaaaccgaatacattgttcattcccactactccttgtatttgctaagcgctttatttattgaagctatcgtgttttcgatatctccatcattatcgataacctccttacagtgccttctgtactcagcttctttaagctggcttgcaaagatactgtcaatcttctcatctgaatagcctcttgatgacttaagtctttttcttctgacttcttcacttgcataaatataccacaactcgtcgcagatttcaccatatccctcctctataaggagtgctgcttcaagaacaagcatgaacagaccatctttttttgcctctttaactgcattaagcacatattcctttactgcaggatgcactacttcgtttaaaagctctctttttttatcatccgaaaaaatcactccggcaagtgccggtctgtcaaaatgcccgtcctcaagccatatcggttcgcccgcaaacaattcctttaatctgttgtagcagtcgcttcccggctccatcagctcatgtgctatctcatcggaaagcatgacctttacgccatcaagttccttaagatagctaagcactgccgattttccggcacctacaccacctgttattcctataaaaatcatactatttccttttctgtcatcaatgcgcatcataccagtcatagccacactcggtgcccacctccatggataccttcatgtccaccgcgccacgcatttctttctccagaagcttaatcactttatccttctcagcttcctttgtctcaattaatagctcatcatgcacctgaaggataagtcttgactttaagccctcgtcaagaagcctgtcatgcacacgtatcatggcaatctttatgatatcggctgctgtaccctgaataggtgagttcatcgcaactctctctccaaactgtctttgcatgaaattgctcgagttcagctcgggaatcggtctgatacgcccaaacatggtctttgtatagccatttttcttggcatccaaaaccgtctgatccaaaaactccttaatctttggatatttgacaaaatagctgtctatatagccctgtgcctctttccttgaaatccccaggtcgttagacagaccaaacgcgctgataccatatacgataccaaaatttaccgccttggcatttcgtctttgaaggtctgtgacctcatcaaacggtgtgtcaaacacaagggatgctgtacttctgtggatatcctgaccattcttaaaggcctctatcatcctttcatcccctgaaagcgccgcaagcacccgaagctcgatctgcgagtagtctgagtcaacaaacagatctccatcctcaggcagaaatacctttctgataagtttgcccagctcaatccttatcgggatattctgcagattaggctctgtgcttgaaagacggcctgtcgcagtgattgtctgatttaaggtagtatggattttgccatcggatgcaatatatccggaaagtccgtcagcatatgtgctctttagctttgtgagctgtctgtattccaatatatccgcgacaatcggatactccggtgccagcttttcaagcacatctgccgcagtagaataaccggtctttgtcttcttttcatttggcagtccaagcttttcaaagagaatgactccaagctgctttggcgaatttatattaaactcttcacctgctgcctcatatattttcttttcaagctcagttatcgaaacagcaagcttgtctccatactccttaagctttattccatcagcccttataccctcattttccatatcatacagcacaaaaacgagcgggagctcgatatctttataaagcgtgagcatatccatttcctttagcttctgcaaaagaaccggctttgatttccaggcagtatacacctcgtagcaggcacagtccactgcctttttctcatcctccttcatcatccgggtgaaatcaagctttcccagataatcctttttagatgagagcataagccccagatagtcctttgcaaccgcatcatagggatactccccgacaagcggattgataaggtatgcagccaccatcatgtcaaaatatctgcctctgtcatctgcctttatctctttgctcttaaatctgtgcagattggtctttaaatccggtgatatccatgactttacttccagggtatttaatttttcatccaggaagctgcttgaaatctcatcacctgtacagataaaataaatgtcctcctctgaaaaacaaatcgaaacagcaagataatcgttagaaaccggctccgaaaacagacttagctgtccatcactttcgcagtttccaaaagactctcccggtactaccgcaaaagcgacctccctgccctttgccttctcaaacacactctctgcagtctttaagtcccttactaccacaaaatgctcctcggcattgtttttaggagcctccacgttaaaccgtgacagcatgtttttgaattcgtatcttttgcacagtaaaaaggcttcctcagtgtagagtgactctactccgccactaagctttgcatcagaaaattcatagtcaaccggcgcatcaagtatgattgtcgcaagctccttgctcataagcgcctgctcccagtactccactatattctttgaagcccttggcggctttacattctcagcgtcctcatgtactgcctctatacagtgatattttgctataagtgcgcctgctgtcttttcgccgataccgggcacacctgggatattatcagacgtatctccctgcagagcctttacatcgataaactcctttggagtgacgccgtacttttcgataacatctgctgtattgtagttttctatctcggttcctgttttctttgtctttggaatccttaccatgacatggtcagtcgcaagctgcaagaggtctctgtctccggaaatgatggcgacatccataccggccttttctgccctgacagataaggttccaagtatatcgtcagcctcatagccttccttttccacgattttaatgcccatagcggtaagcatttcctttatcataggcacctgctgcctaagttcctcgtccataggctttctcgtgcccttgtacgcatcaaacatcctgtggcgaaacgtcggtgcatgcacatcaaatgccaccgtcagatagtcaggcttttcctcgtcaagaatcttgaacatgatatttaaaaaaccatagactgcatttgtgtgaagtccctctgaattggtcagatcaggcagcccgtgatatgccctgtttaaaatactgtgtccgtctataagtacaagcttttcactcattttgatactttccttactgtcaattataatattgttgtaatcgctgccggtcacactgcagtgcaggcagtaacgttaaatagctcttgtatatttcttaagccactgagcctcctcatcattcaaaaatggtgaaacaagctcataaactctagcatggtaagcgttcaggtatcccttttccctgtctgtcatctgatttggatcaatcgcatcgagatctatcggtacataagtcagattctcaaaatacatgaactggccatactcatttttctcaccctttcggcagataagctcattctctgtacgaataccgaatttgccctctaaatagatgcccggctcatctgtagtgaccatgccctcttctatcacacgctctgcagttctgcccgggtactgcttccagtgaaagctgtttggtccctcatgaacattgagcacatagcccacaccgtgtccggtaccgtgattgtagtccatgccaatctcccacaaaggctctcttgccagaatatcaaaattaaggcccgagcagccctccttaaactttgcatttgccaggttcatatttgagcggcacactctcgtaaacatatccttcatctcgtcagtcacagggcctagtgcaaaggtcctcgtgatatctgtggttccctccagataatgtccgcctgaatcaaccaaaagaagactctcaggcttaagctgcctgtcagactcctctgttgcagagtaatgcacaatagcaccatgatcagcatatccgcatattgtggcaaagctcaaatcaagaaagccctcctgctcagctctaagcgatgcaagataatctgaagccgaaatctctgtcatggatatcttacctatatttgtcttaagccagtacatgaacttgcacatcgcaactgcatcctttaaatgcgccttgcgcagattttcaagctgtacttcattctttacggccttcatgacaactgtaggatcctccgcatcaatcaccttaacaccatccggcaggctgtcgcagatgcggtaatttacaatcgatgtatttaaaagcactgtctctttttcatcaatatgcttcacatattcataaaaatcatcgtaaggtcttgtctgtataccattcttatcgaggtatgccttaagagtctctgtcacaacctcttcctgcaaaaaccatatgcagctgtcctgtgacagtgccaggtatgaaagcactacaggcacatagcttatgtcgcctcccctgacatttaaaagccaggcgatatcgtaaagtgatgacatcagatgaagggttgcacccttttgtgccatctgctctctgactcttttaagctttgagcttatatcctcaccggtatatttattgtcaaaaatcatgacaggtgcctttgacataggtggtctgtcagtccatataaggtcaatcagatcctcatttacgtacatgctgccgtgcttttcttttgcgatttcagaaagccttttgccccatgcggcatttactactctgccgtcaaagcctattacaccgccatccgaaagagtatcctttatatactcatcaactgtcggtacaccctcctcgccaatcttaaacagctttacagtggtatccttaagctgcgcagccgcctgcacaaaatacctgccgtctgtccatagtccggcctcatccatagtgatgactgcggttcctgctgagcccgtgaagcctgtaatatatttgcgtgccttaaaatgctctcctacatactctgactcatgaaaatcagcagtaggtaccacatacagcgagatgcccctctttgccatctcgcttctcaatgcttttaatctatcctgtatcattttattatgcctctttaaattcaaaaaattttgtatctaattccggatacattctctttaatgagattggtttgccggatttgttcaaaaaacaatggctgctctttgcagtggtgcgaagctcgcctgtctccttgtccttcatgacatactcaagctccatcttgattccgttatacttaagcagctttgtgtagatgacgaccgtatcatcgaaatgtaccatactgtgatactctaccgatatcgacagcaccggacttatgatttccatatcctccatctgcctgtagttgagtcctatctgatccatcaaatcaagtcttgcttcttccatccacttgacatagtttgaatggtggattatacccatctgatctgtttcataatactttgcgtggtgctcgtaaggacggattctaatttcaccttgtgagccggcaatctgtaactcattgtttgccataaaaacttcctccattcatattttggtcttatttctattatgccacattggacagctaaattcaacgacttgaccgtaaaatataaaccggctgctacctgcgtatcatgctgtagcagtctctgcatatattgcgtgaatttccaatcggaagtattctgccgcaataccggcatctgataatatactcatccttgctctttgatagaagctgcataatctttgcctgtgttttgtcgcgctcgttttcaagccagtcctcctccacaattttgcccatgcggactgaaaactgatagtacaaatcaagctttttgtaataggattcgtatttcatgagcccctgatactttgaatgcttatcaggcttgtcgagagagatatcagatgtatacgacatgcagtagcgcagccattgtctgacaagctccctgtcctttatatctataggacatgtaatcatcttataaagcagatatttgtcatcaaaatctgcgataaagtatcgctccttatacgcatatccatacaaaaacaatatctcatcgacattgattttcctaaacggtgctgatggctctgcctcatgccagagcttaattatcgcatcaagcggcgcatccattgtaaggagcacctgtgggaagccaagacttactatatcaatatcctgctccggtatatttagcgtattcttcagataattcagattcttttgtcccaaagctgtcacatagcctgtatcatacagaccaaatctgcctgcacggcccgctatctgttttatctcagagatgacaagcggacgtcttgatactccatcaaacttttccacctccagaaatacaattcttctgaccggcagattgagtcccattcctatcgcatctgttgacacgacaacctgtgtctttttctcattaaaaagcgtcatctgcctgcgccttatttccggtggcagacttccgtatatgacacttggctttatgccgttttcctccagacgccctgctatattgagtaccgacttctttgaaaatacgataaaggcatcgccctctctcacatcctgtggaaatgaaaaaggcttatcctccagctttagagctgtctttctctcatactcccttatctcatactcgtcgtggcacagattaatcagatgaatgactacatcctttgccaccggactcatgcatatatgaatctctcctgcaagtgtaccaagaattgccctggtccatgaatgtcccctgtcatcatctgcaaccatctgtgcctcatcaatcactgcgatatcatattccttgtcacagtcaagcatctccaccgtcgatgctgtaattctgctgtctgatacctcaagacactcctggcctgtaagcatggtgcatggtatgcctgcatcattcatcttctcatatacctcaagtgccagaagtctaagaggtcccagataaactccgttttgcgccagcttaagcctctcaagcgcctgatatgtcttaccgctgttagtcgggcctatatgaagtatgaagcgccttttcatactctgtgcttttggaaactcaagctccggccgtgccggaaccagcgtgacaatctctcttctaagctccttgctgcggaactcattataaagctctttcatgcttctggtacatatcgcacctatatactccttgcgcaaaagctttagaaaatcctctgtgagatactctgcctccttctcatcaaactgctccatatccaccctgacgagctgcggaaggatttctctatttaaaatctgccttgcatttttattgttggaatagtaggtgatcaatgcaagcctttttatttcctgatgcagcttgtcaagtgccacagtctcattttttgaaaatcgcgcatatttaattgattttgctttattattgagcctgtgaatatagtgtgccagctttacaggcttacctgtacttctcttcgcattctccctgtactggtcaacataaaactgtaccagtacctcttcaaacgatttttccatatatgtgtgttatcctctttatttatatacaccgttaagagtcacctcaaacgtaacatcctttccggctagttctgtatttgccttataatcatccgggaatttaagatttaaatcaaaggtttctcccaccttgtgacctaccactccgtcctcaaagccatctatatagctgcctgagccaagcacgaggtctgtgccctgtccatcagtgcttccaccatcgaatttttctccgtccatatatccggtgtaatcaatatttaccttatctccgttttccgcaaccgtgtcagtctctgtattcagtgttgctgcctcggtctgtgaatcactgctttgtgtctcggatgcctgagattctgtggtctgtgatgcagcttctgtaccatcagtgctgttcgatgatgaaccgcccgatgtcgcaactgcccagataagcactatgactaccacaacgactgccactaccggcacccagaatttcagcagattcacaacctttgccttcttttctgccctctctctctcgattcttcttttttcctgtgcgatttttttgttttgtttgttcattttattaatctcctgttttatttttattattgaattatactattacaatttgaacattctgtgtttcgcataaatgaactgtatgcgttacaggtcattgtaagcattatctgtcactgttcgctttaaactttaaacggctgcgtctcttaactatttgacgaaacaataaaagcagtagaaagacgcccacacagcctgcgcttatagctgcacctgccttaagccccggtgtctcataataaagctctatctcatgctctccctcatccagatgaatgctcacaaaggtatctgaaaaatcctcatactctgcatccttcccatccaccttcatagtccatcccttttcactcggaatagaaagcacaagtctgcctgcctccttcacatctatgtgtccgcttatgtgtgtatctgaaaaattctccaccgaaagtgtctgatcattaagcgcattgtatgcaccttccactgctgcagcatttagctcgtatacgttaaatcgtacagcatcggcagcagtgtttgtaacggaaaccgtgtcccccgccttcacatatcccaggtcaaacagatacctgtgagtggtcttcgagtatgtggtctcatactctccgtggctgaaggtcagactgtcagtgctgcacgaatcgtatgccgcataataatatccgtcatggtcaaaggtgagagtcgtagttcccggattttcatcctgaatgcactctgtcagggtcagcgtatcatctgctgcacctagaagcctgccaagagagttaatagaatatattttcgatgaagatgatggtttccacgcatcaatcactccctcatccatcataaatccaagcggaagtgtgtagttattccgatacagatagtgatttccgcattttcccacaagtgtagtcagctcattctgtggctgtattgattttgtaaccatatatctgaccgaaagcatggctgacgtgacaggtgtggcaccgttataacagtagaaattcttgcctccctccatataaagagcctgataaaaatggctcacatttatattcatcagggaagaaaactgtgttccagaagcatagccgtatcgtgtgccatcatttttagtaagtcggcctgtatcctcaactctgtaaaatggtacattgttgtcagctgcatcctcttttgccagcttaagtgccttttgcatatcgtccacattggcattgtagctgcttctgccggtacatccaagtcctgtcacagccatattgacagcaagctccacaatcgcaataccgcatgttatgaccatcaaaagctccctgtttttgcttgctgcaagctttaagagtactgtcataatgccgtacagcgcaacaaacaatatgcttatgataactgcataatactctgtcacatcctcaccggcaaacatcgtgcttactgccataagcgccgatgcaaataccactgccacgccaatatgccacaatcttatgccacgccactttctaactgtaacatagcctatggtcaatacaagaaatgcatacagatacgactgtctgccaggcagcgaatccggaaaatgcagtccgtgccatataaagtcaagctgtttattggcaaagcttgccatgaaaaacaacacaaacaatacaggagctatttttttcttccaattaatccttttgttgagcacaaacaatatcaaaagcatcacactaaaagctccggcatacagattcggccagttctctgcaccctcatagacgcttgctgtcgtgcacatcctgccgacctccgataagagattaaaataccactctatctgctttgggaactcaatccccgatgaaccgctgtagcttaaaatgataagctccgggatgattagcaccatcgcagtgcctccagccaaaagcgagtaaacggcaaatctcacaattgcagccattttaccgccattttgcgtaaagaaaagccatgcaaaccagaataccaaaaagatgcaaagcatgatactcagataatagtttgacaatatacaaagtgccagtgatacatagtaaagcaccggctttttgtcccgcacaagcttctcaagtcccactatcgcaagcggtgcaaccgccacaacatccatccacatgacatcccagctatacgcagctacaaagccggaaagcgcatatgccgtagagaaaacaaatgccggcacaaatgtattattgtgatatctgttatcctttccaagaagcacaaagtgctccttcagaaaataaaaaaatgttgctccgcttagcgaaatcttaaaaatgattagcagctcgataaactcaataatatggctctttggaaaaagcaccacaagccagtttaacggactcgccagataataggcaaataccgatacaaaatcactgcccagcccgatattccatgtatacatgaggctcgcaccatttcttagcttttcccacagctcattaaagaaaggcagatactggtgatacaaatccatatgcaaaaggcagtaatcgccaaatggatatacaccatttcctatacagatgattatacatatgaaaaacggaattaaaaacgctgtcaaaagtggatgctttttaacaaaattcatcacttatcctcccagtcaaacagtctgtaatattgcaaaagcttataatcgtttagcatatccgaatcggcctgcttatttttgctgccggttgccttgtctgatttatttgatgctttatctaatgtcttatctgcagttttatccgtgcgtaccgctgatataattggatactcctcctgcagctttagcagaaaactctgatagtcatttgtcggcacacctgccgctttaagtacgtttgcagccagataattaacgctcgtgtcttttcctgcagcctcatcaatatcataatttgcccagataacatacggcacctgatagcgcagcttaagctcttcatttgataaattattatagtccatgccgtttgctgcaagaacagagcttgccacagtatcatttggctgatgatcaccgaaaaataccactatagttttctcatccacatttgaaaaatattcaatgaggctctttaaatcctcatctgtcagcttaatcaaagaaagatactggtcaagtgcagaattattgagcttatccgctgtcaccgtattgtcaaagccgtagtaggtatccgtgtatccaccatggttttgcatagtgacattgaatataaatgccggctgaccatccggtttgttctcataggtctcaataatcctgtcaaaggatgtctcatcacttatatatttgcgcacaaacctctgattagaataatcctgcataaacgaaagattgtcaaatcccaaaagaggatagaccgtatcccggttccatccactgccatagtacggatgctgtgcatacgttgcgtagcctatgctttttaaatagcttgcaagtgaaggtgtcgtgctctttatatactgctgataaggaatacttcctaccggaagaaaagccatcgtattgcctgtcagaaactcaaactcagtatcggcggtatttccaccacatacagacgtattcagatatcctgttatagtgttctcattgcccttttcaagactgtgcacaaacggcatatagtctgtatttgtatcaaaatcaccgagcactgacaggtctgaaaatgcctcatccatcacaactataatattcggataatcacttttatctgtaattgcagtattattagctgcatctgaattatcatctgtaccggcatagctgtcaagcagctccttagccttctgtctgctatacccgtcaggcttatcaaccgccacaaacttaagatccatcgcaaaggtcaccgccattccattcacctttgtcatatatgcaggtgtaaatagaaacggatacaggtaattgtccgtctggaaatcctcatcctgcagggcattcacaaacaggcacatcacaagtaatccaagcactgtcggaattagtctgaacctgaatttccacttaattctaaaatcaacaaaatgcatcagcataataagagctataaatataactgtaacaacaactactcctgcagtcggtgcgaaatcataattggatgcaacacttgtcgccgtaccaattgaaaaaatatcccatggaacaaaaggagtcgagcggaaaagcataacataatgattaatcagtccaaaaaccatggccactataaagactgcacgaagcgcccactttgccctgccagtaataaaataaagaatccaagcaatcagctcaaacaaaataatattaaaaaatcccgccataaatctgacttcttcaaaaggattatgttcgtagaactccataagataaaaagccgcaatcggaaaaatcgagaataatacaacattgaatataatttcatattttttataaatcttttttatcataataatgctcctgtttgctatctggtattacatcctatatggcagatttttgggtaccttttttagtacaattttggggcaaatttttcttaaaagtaccctgatttctttaattttttgaaagattgtaagtaaagaaaaaccccgcaaacccttgattttactgaaaatcttggatttacggggttttgcaaatagtgccggcagtgggacttgaacccacacgggcttgcgcccaacagattttgagtctgcatcgtctgccattccgacatgccggcgtcttacgaacagacaatattttatcacaattattgacttcatgcaactaaaatttgtaatttcaatataaatttcaatgcgattatgactgttcacgcctaacaatgtgaccagcaacgattacagctattataacaatatattattagggtgaaaatactagactattttgctactttttttctaattatatatccgataagaataataacagcacttgttatgacacttccataaaatgtcattcccctgcacaaaagctccatattcgctgcatttctaccaacaagctgtttaaacccatcaatcataatataatcagccacgcccatagcaccgggtataggcacacaattggagcccatcgccacaaaacactgtatcacactcacatcaactgccttatttacgccttcgccgactgccataaaaatcataaacgataccaaaagctgtgaaactctctgcattatattccaaaagaaaatctcgatgagaagcccggtctgccctgtgatactgtttgaacactcctgatattctttcatagtatttttaagctttattcgaagcctgccaccatgccgtattatgtgtattctctcaaaaagccggataagactatcacaaattgagtatagtatgtttcccttccttagcagcatataaaatacaagagccagaaaaatcagcactacaatccccaaacatataaatatccgcgaaatacctgagaaatttttcagcaatggatacttaaaaatcatacatagtacgccaattgttaaaagtgaaagtgtatacataacaagattaatcagcagggccactgtagcagcatagcccggtatgccatcccttatcatgaaatacgcactggctggctgtcctcccgatgccgatggtgtaatagccgaaaaatacacatcagctccaccatacacagtaccatcaatcgcactggttttatacccaaagtgtcttgccatgcgtaccagagcaaagccttcaaaccaaataaacccaaacgtacaaaaaaaactcataaaaagccagcctttatttgcatttatgataaaactcataagaatctcaaacgaaaaatgcttgctctgtgagacaacagtccatatgcttaagatagctataaaaacagaagctatcgcccaaaatatcttttttctgtccattaaatctaatccccttaaaaaaaactggtaaagtgaattatgtaaatacaccataccagtttattgtagagaatatatataactttatcaagtaaaatattattaatatctttttaatgtttgttaaattatttactattacaactaacaaatcagtctaaatacaaattaacttctatgattcctcttcctcatcattgtcagtgttcatcatatacacacccctgcttgcatctccatcaggattctttccaaactcataatcatttcccggcagaatagcatttaagaaaatccctgcgatagctgcaattgccaaagctgtcagtgtaattgatgttcctgctacagtaaatgtcagtccatttccaaagccaagaccacatacaaaaataacacctgcaataatcagatttcttgatttagtcagatctaccttgttttcaacaacatttctaactcctattgctgaaatcattccataaagcataaatgaaactccaccaataatcgctgatggcatagtagatattacagccgaaaactttggaataaatgaaagtgcaatagcaaaaacagctgcaatacggataactcttggatcatataccttagacagctcaagcactcctgtattctcaccatatgttgtattagccggtcctccgatggctcctgcgaatgcagttgcaattccatcacctataagtgtcctatgaagacccgggtcagcaataaagttctgctctactgtagcagaaatagcagacatgtcgccaatgtgctccatcatagtcgcaatagcgataggcgccataacaagaatggacgtaatatcaaacttcatgaactgaaatttaggtattccgaccaacgcagatgatgcaattgatgtaaaatcaagaattgctgaaccatcaggattagtaattccagcagcattcataataagagcaactacataggaaatgattactcccattagaataggaataatcttaaataagccttttccccatatattgaaaataattataactccaagtgcgataattgcaagaacccagtttgttgaagcattattgatagctgagctggcaagtgaaagaccaatgcatatgataataggacctgtcactacaggtggaagaaagcgcattacacgcttaattccaaccagcttaatgataagtgcaagtatgaaataaagcatacctgcaacaaatattccaccacacgcatacgcggccttatcattgacagccatatctgcatacataccactgtcaaggtttgcaacagtataaaagcctcctaaaaaagcaaatgacgaacccaaaaaagccggtaccttaaactttgtacacagatgaaatataagcgtgccaaagcctgcgcaaaatagggtaaccgatacagaaagacctctggtaagcggctccccacaagccttctgaaaatatcctgatacaagaataggcacaagaattgttgcgccgaacatagcaaacatatgctgcaaaccaagaataaacatcttggccgttccaagctgtctcgcatcacgaattggctcctgtttcttttgttccataacaacctccttaataaattaatgttttcgataaataaccgaaaacattatagcagtttttaattattatttcattattatttcattatttttttactattttttacaaaaaaaagacatctcattggatgtcttaaataattcatatttaataggtttgtaccttcaaaacttcatacaaatccgatttgttttcattaatctacaccgaaaaactcatctcgattccacttcgcttcatctcgatggatttgcttcgcaaatctgcgtccaattaaatccagatttatgcagacacgtctgcaaaatccgtatttcattgtacttgtttttcttcgttattaaccagattaagccctcgacctattagtaacagtcagctccacatgttgccatgcttccacctctgccctatcagagccgataaaataaggctttgcggacatttgagaagatataaaaagatagttaaaaagacatatataatttagagtaaaatcactatattttacgaaatataagttgactatatagcataaagatagcataatgatacataaagactgatttctttgcggaaagagagaaaaaaagcgaaagagagtaggttacatgcagataatttttatacatcacagttgttttcttgtggaactggatgacaaggtgcttatatttgattattttgatggagacaaggtggagggtatgcattttaccggaaagctgccatcttatgagccggatacaaaaatctatatgtttgcaagtcacagccacaaggatcattatgatatggatattttgcgtctggctgacaaatatccgaatatacattatattttttcaaaggatatccgtatcagtccgcattttttatcaaagcatggcattgatcccgctgtcagggacagggtgacatttgtttcacctgacaatacatatcatgtggatgatctggacataatgacacttagatccaccgatgccggggtggcattttatgttgcctcaaacggtgtgagcctgtttcatgccggtgatttaaacgactgggagtgggatggtgcaggagacctgataaacggcagagtgcgcagagccttcaggcatgagataaaaaagctttcggaaaaaccaataaacgtggcatttttcccgatggatccaaagcttatggaatatcagttcaagggctttgattattttttacaaaatacctcggcagagtttgtgtttcctatgcacatgtggcaggactacagcggtattactgaatacaaaaagaggctgagcaataaggaaatggctgacagggttattgagattgaacgtgaaaatcagacgttcgcttttggagagaactattgaattatttcacaaattcatttataataaattagttcaataaattttaggagggtaattatgggggactttttcatgtgcgtagcacaatatgttattattatgattgttttggcggccataggcttttgcggggcgctgattggggtaaagcttcgtaaaatgaaggacgcaaagacaaaagaataggagattcaagtaatgaagaagagttatggcgttaacgaattacgtcgtatgtaccttgagttctttgagagcaagggacatctcgcaatgaagagtttttcactggtgcctcacaatgacaacagtctgcttcttattaatgcaggtatggcaccgcttaaaccatatttcacaggacaggaggttccaccgagacgtcgtgtgactacatgtcagaagtgcgtcagaacaggtgatatcgagaatgtaggtaagacagctcgtcatcttacattttttgagatgctcggaaacttctcgtttggtgattatttcaagcatgaagcaatcgcatggtcatgggagtttttgacagaggtgctcggtcttgagaaggacaggctttatccttccatctacggtgaggatgatgaggcatttgatatctggactaaggaagtaggagtgccggcagatcgtattacacgtttctacagagatccaaagaccggtgagtgtgacaacttctgggagcatggcgcaggtccttgcggtccttgctctgagatttactacgaccgcggtgagaagtacggctgtggcaagcctgattgtaaggtaggctgtgactgtgaccgtttcatggaggtgtggaacaacgtattcacacagtttaacggtgacggacacggtggatacactgagcttgagcacaagaacattgatacaggtatgggacttgaacgtcttgctgttgtaatgcaggatgttgattcggtattcgatattgataccatgaaggctatccgtgacaaggtctgcgagctttcaggcaagaaatatcatgtcgatgagatggacgatgtttctatccgtcttatcacagatcatatccgttcgtctacattccttatctctgacggagttatgccatctaacgagggcaggggctatgtgcttcgccgtatcatcagacgtgccgctatgcatggacgtacacttggcatacagggtgcattccttggcaaaatcgcgcaggttgtcattgatgagagtaaggatggctatccggagcttgaggagagaaaggatttcatccttaaggtgctcactcaggaagaggagaagttcgcgaagactatcgaccagggacttggtatcctcgcagatatggaagagcatatgaaggctgacggagtcaaggtgctttcaggagaggatgcattcaagctttacgatacatacggcttccctgtagacctcactgcagagattctcgaggagaaaggattcacatatgatgaggctggctttgagagttgtatggaggctcagagacagaaggcaagaggagcccgcaaggaaacaaactatatgggtgctgatgccaatgtttacaatgatatagattctgaaattactacagagttcacaggctatgacaagcttactgacacagctgagattgctttccttaccacgtctgatgatgtagtcgaggctctttcagatggtgataagggctctgtaatcgtgccaaacacacctttctatgccacaatgggtggtcagcagggtgacaagggtattataaagactgagagcggtacatttgttgtcgaggatacagtaaaggtagttggcaacagatatgcacatgtaggatatgtgtcagagggtatgatccgcacaagcgagaaggctacactttctgttgatacaaaaacaagaacaaacacatgcagaaatcactctgccactcatctgcttcagaaggcgctgcgtgaggtactcggcacacatgtagagcaggcaggttcttaccaggatgctgagagaacacgttttgatttctctcatttttctgctatgactgctgaggaacttaaaagggttgaggatatcgtaaacgagaaaatcaacgaagctattgaagttcgcacagatatcatgactgtcgatgaggctaaaaagacaggcgccatggctctcttcggcgagaaatacggtgaaaaggtacgtgtcgtatcaatgggcgatttttctaaggaattctgcggtggtacacatgtaaagaatacatctgatatcaaggtattcaagatcctttcagagagcggtgtagctgctggcgtaagacgtatcgaggctatcacaggcgacaatgtattcgcttactacagtaatatggagaaggaacttgaggaggctgctaaggttgttaaatcaactcctgcaaacctcaaagagagacttgagcacctgatggctgagatgaaggcacttcagagtgagaatgagtctcttaagagcaaggcagcaaaggatgcactcggcgatgttatggatcaggtagttgatgtaaacggcatcaagcttcttgcaacaagtgttgacggcgttgatatgaacggactgcgtgatcttggcgattccctcaaggaaaagcttggcgagggagttatcgtgcttgcttcttcaaatgaaggcaaggtaaatcttgttgccatggcaacagatgctgccataaagagcggtgcacatgcaggaaacttaatcaaggcaatcgcttcaaaggtaggcggtggcggcggtggacgccctaacatggctcaggccggtggaaagaatccggcaggtattcctgatgctattgcttcagtaaaggatgcactttcaggtatgattaagtaacaaaaatgcatatatagtgctttaaaatgcatatatagtgctttaaaatgcatatttaaaaaaatgggtctaaatttgttaaaaaaatatccggatttatcttgacaaatccggatattttgataaaatacatgttagtgcaattaagtatagatacctaacagttgatgcacaatacacaactggagggaggttaggttttaggttatgtctagtgtaatagttaaagaaaacgagactttagatagcgcattacgcagattcaagagaaactgtgcaaaagcaggcatccagcaggagatccgtaagcgcgagcattacgagaaaccaagcgtaaagcgtaagaagaaatctgaagcagctagaaaaagaaaatacaattaatgtattagagaggactaccgcgtgcggtagttcttttgttatgtgtcaacataatttaataataaaaatttaatttgcatatttgtattattgctagtaaaataggacttagtgaaaagaaaaggagtgaattacaatgacaaaaattgacattatttcaggtttccttggagctggaaagactacatttatcaagaaaatgatagatgaggcttttaagggtgagcagatagttctcatagagaatgagttcggtgaggttggtatagacggtggctttttaaaggatgccggcattcagattactgagatgaactcaggctgtatctgctgttcactggttggtgattttggtaagaacttaaatgaggttattactaagtatcatccggaccgtatcttaatcgagccttccggcgtaggcaaattatcagatgtcatgaaatcagttatagatatcgaaaaagagcagccggtcaagctcaatgcacttgttacagttgtaaatgcgcttaaggcaagcaagcagatgaaggcctttggtgagttcttcaacaatcagatagagtatgccacaacagttatcttaagccgcagccagaatgctacacctgagcagcttgagttttgcgtaaagcagatacaggctttaaatccaaaggcttcagttatcactactgactgggatgctattaaaggagagcagattcttaagactatggaaggtcaggacaatctcgagatgaaggtgcttgctgaggcacgtcatgcacaggatgaggcagagcatcatcatcatgaccatgatgagcatgagcatcaccatgaccatgatgagcatgagcatcaccacgaccatgatgagcatgagcaccatcacgaccacgatgagcatgagcatcaccacgaccatgacgagcacgaacaccatcacgagcatggcgagggctgcacctgtggctgtcatgaccatgatcatgagcacggacatcatcatgctgatgatgtatttacaagctggggcaaggagacacctcacaaatttgagcgcgctaagctcgaagaaatccttaagcagtttgtggaagatgacaagattcttcgttcaaagggcatggtagagggcacagacggcaagtggatttactttgatatggttccgggcgagtacgagattcgtgatggcgagcctgactatacaggacgtatcgttgttatcggaacagatatccacgagcatgagcttgaagagctcttcggacttgtttaaatgtatttaatatagttatacaataatcagaaaggaactaacaaaatggctgaagagattccagtatatttatttaccggattcatggacagtggcaagacttcactgattaaggataccattttcgagaatgatttcgctaatggctcaaaggggcttatcattatgtgcgaggatggtgatgtggagtatgatatggataagctaaaggctgccaatatccaggttgcagagatcgactcggaggatgagtttacagctgcaaagctgaatgagctcaacatgcagtatttgcctgaacaggtgtttatcgagtacaacggcacatggggcattgataaaataatagaggccgagctgccaaagggctgggttatcgtgcagtcgctcgccacagttgattccactacatttgacctttatatgaacaatatgcgcgcgatgatgcaggaacaggtatttgcgagtgatgttgtcatatttaacaggacggacgatgatacagacagaggacatctaaggcgtaccataaagaatatcaaccgcaaagcccagatagtctacgaacgcaaggacggtactattgatgagcgtccggaggaactgccgtttgatataaatcaggatgtgattgagctttcagatgcagattatgccatctggtatatggatgccatggagaattacaagaagtacgacggcaagattgtcaaatttcttgcccttgtatacaatcctgataagcttagaaagggtgttatggtaccgggcaggtttgcgatgacctgctgtatagaggacgtgacctttataggctttaagtgcaagtatgaggatgagagcagtattcctcacaaatcgtggattaccatcaccgcaagggtgcatgtggagtttgcaagagagtacaagggaaagggaccggtgctttatccggtttccatcgagcctgccgagaaaccgcaggatgagcttgtatatttctcataaaagctgataaatacaggaaccggttcattttttgcatgaattggttcctgttttattattattcacaagtaactattcaaaaccactgagagctatcttgattacatattacataatatgattttataaagtaccggacgaatatcaaaagataacacaattttataagcatataacatatttttatggaatatctaaagaaatatattgaaaaattatatcatttcatttaaaattaaaaaagtatgaaataattgagtatcagattacatatgtaatgggataagatttaactaggaggaagactatgtatccaatagttcgaaaagaaaaattggctgacaatattatccttatggatataaaggcaccacgagttgcaaaagagtgtctgcctggtcagtttatcatcgcaaagacagatgaggtaggagagagaatcccacttaccatctgtgattatgacagggaaaaagagactgttactatcgtagtacagactatcggtgcaggaacagagagaatgatggctcttaatgagggagattcattagaggattttgtcggaccactcggctgtccatcagagctttgtcaggaggataacctcgaggagacaaagaaaaagcacatcgtatttatcgcaggaggtcttggtacagcccctgtatatccacaggttaagtggcttaaagagcatggtgtggatgctgatgtcatcatgggctttagaaataaggatattcttttctttgaggatgagatgaaagctgttgcaaagaatctctatgtctgtacagatgatggctcatacggcttccacggcaacggcagccagcagcttcaggcacttgttgatgccggcaatacatatgattgctgtgtagctatcggacctatgattatgatgaaattcacatgtctgctcacaaagaagcttgagattcctacaattgtttcaatgaacccaatcatggttgacggaacaggtatgtgtggagcatgccgtctgatcgtggacggaaaggttaagttcgcatgtgttgacggacctgagttcaacggacatcttgttgatttcgatcaggctatgaagagacagcagcaatataagacagaggaaggcagagctaagcttgcctatgaagagggcgcaacacatcacggtggctgcggaaactgcggaggtgacaaataatggaagtcgatgtattaaagagagtacctgtcagagagcaggatccaaaggttcgtgccacaaacttcgaagaggtttgctacggctacaataaagaagaggcaatggcagaggcaagcagatgcttaaactgtaaaaatgcacagtgtatgaagggctgccctgtttctatcaatattcctgcatttgttgagcaggttaaaaatggtgatttcacaaaggcttatgagattatttcagagtcatcagcacttcctgctgtatgtggacgtgtatgcccacaggagagccagtgtgagggtaagtgtatcagaggcttcaagggcgatcctgtctcaatcggaaagctcgagagatttgttgctgatacagccagagagaatggcatcaagccaaagacagccgcagagaaaaacggcaaaaaggttgctgttatcggctcaggccctgcaggacttacatgtgccggagaccttgcaaagcttggctatgatgtaactatttttgaggcacttcacgctgccggcggagtattaagctacggaataccggagtttcgtcttccaaaggacaaggttgttgcggcagaagtagagaatgtcaaggcacttggtgttaaaatcgagacaaatgtagttatcggaaaatcggttaagattgacgaactcatggaggaagaaggctttgaggctgtatttatcggttcgggagcaggacttccaagatttatgggaatccctggagagcaggccaacggtgtattttctgctaatgagttccttacaagaaataacctcatgaaagcttttaaagagggttatgagactcctatctcaaaaggcaaaaaggttgtagttgtaggtggtggaaacgtagccatggacgcagccagaacagctcttcgtctcggtgcagagacacacattgtatacagacgtagtgaggcagagcttcctgcacgtaaagaggaagtacatcatgctaaggaagagggagttatctttgatctccttgagaaccctacagagattcttgtagatgagaatggctgggttaagggtgttaagcttatcaagatggagcttggagagcctgatgcatcaggacgtagaagccctattgagattgccggctctgagtatgagatggagtgcgatacagtgatcatgtcacttggtacatcgccaaatccacttatttcctctacaacaataggtctcgatacaaataagagaaagtgtattgtagctactgaggatacaggtgcaacctcaaaagagggtgtatttgcaggtggagatgccgtaacaggtgctgcaacggttattcttgccatgggtgcaggaaaagcagcagcaaagggtattgacgagttcttatctgcaaaataatatagagcttaaagcattatttatgatgcttcatacaaaaaagcttccggaaggatttaattctttccggaagctttttggttatatgttatgtttatataaaggtatttagcatcattgtgtaaggcaattaataagccttgtattatcctctggcttcattatacaaaatcgtatgaaccgctcctcaagcccggggaaggtagagcagtcccttatcatcatgccctgccttatggcgcgctcaaatagcatatgtgcatccacgccttcatcaagtatcttaagcagatagaagttgctgtaggatggataaagcttgaatttgtgtgatttttcaatcaattgcctgcatctggttttctccgaaagtattaagcttcttgttttatctatatattcttcatccaaaaacatggtttcgcctgcaacaacggcgagagagttaatcatccacggatttttgtttgtgtttatgtctgtaagaatttgtgaatttgatgttatggcatagcccagacgaagtcccggagtggcaaaaaacttggatgtgccgcgtaatataatcacattgtcaaacaattcagtcagaggtattgctgaaagctcatcaacatccggcacaaactctatatatgtctcgtctatcatcacataagtatttgtctctttacagtgggttaaaattgttttgagcttatccggtgtgataagactgccggtcggattgttgggattacagatgatgacaaggtcggtatcagctgtgattgcagagatgaattcatccggattaatcttaaaatcatccttttccttgagaaaatagtaggagatatcactgccgtttatccttaaatcacgctcgtactcagagtaagtcgggcctaacagaattgtcttttttggagctgtaatctgaatgaaaagtgagatgagctccgtgcatccgtttccgactgttatgtgattgtagtcacatttgcagtagctgccgatagcctttctgagagaagtatactccctgtcgggatattttgtgattgcatcaatgcgctcagacagtgccgtctttagtttaccggattcaccgagtgggttgacatttgctgcaaagctcacaatattttctttctttataccgtatattttttctattttttcaaggtcactgccgtgaaaatgctccttttgttctatcattagctgtaatttcctttctgatttgcattgcaacagcattgcaaatcgtatataatttacattatatgattaaagggtcaaaaggtatcatcgatgcatgcttgcatgcaattcgatgtataccttagtggcccgcactacaccgagaaagtagcaatttgctgcggggacgcagaaaattagcggatttcgaggtgtagtcagattacgggaatgcgtagcatgtagtaatctgattaatcataaatgaggggcaaaataccttttgaccctcatatcattatataataagtgtataaaaaatcaacatttaacgtaaacggggtaacaattgtgcgagcacgtatagggcagatagctgccggcagatttaatggcacgaaaccgattttggcgttttcagaggagacaatagacctttcggtcattgagggaagaagcgaagcgggaagctttgtaatagaaagtacgaatcagataaaaatctgtggcatagtttattcgactaatcctaggatggagtgtctgaatccgcacttcgagggcgagaaagtcaggattcgttatcaatttaacagtaagggtctcacggagggcgatgcctgcgagggcaaatttgtgattgtatgcaatcagatagagtacagtctttctttttgtgcaagaatcacaaggctctatgcggaagcatccaccggagctgtaaagagccttgatgattttacaaggcttgcggcatctaattgggatgaggcttatcatctgttttataatcgcaatttcttaaacacaattccttatgacaatgtatatgagaggctgacctatgagggctttgcctgcgccagaccatccggtcagaatatggaggagtttcttattggcgtaaacaaaaaaaagcctgtttccattagtgtagacaagtcagaggagatttttatggcctctaaagaaccacagagtggatgctttaccataacaaaggataactggggctataccgagatacgcctgcgcacggattgtgaattcataaagctgtctaagcctgttttaacgcatgatgattttataggtaaaacctatctgtatgagtatatcatcgatgcatctgcaatgcatgccggacgtaattttggccgtatatatattgatggtgtatatcagagctttacaatagatatcacggccggtgtaagagatgatgatggcagcataagtggtatagctgtgacaaaggacataaaggaatgcatggtcggaatcatggagctttataccggcttcaggctgaagcggatagtgaccggggtatgggcaaacgagactataagcatattaaaccacctgcatgcactcatgccggatgagcatatgtatgagctgatgaaggctcaggcatttattatcaacaggcaaaggcaggaagctaagtggattcttgatgatttcaagcacagtaatcctgataagaaagctccaatctggggctattatctgtatctgatgacgctgttagagagagagccctcatacattgacaatatgacacacgaagtggagctgattttttatgaaaatcctgactctgtgcttttgttctgggtacttttatttttgaggaatcagtattttgatgacaatgccggtaagcttaaagatataaaatactgggtactgcgaggctgttcgtctccgtatttgtatattgaagcttattatctcatatcacaggatccttatctaataaaggagctgtcggtatttgagcttcacatcctaagctgggccgtaaagaaaaaggctctgacaaaggagcttgccagagcaatttttgaggcggttgatctggcaggcgggttcgataacagggtatatgagcttcttacagcagcctatgagatatgtccggaggcagagtatgttggcatcatatgcagctacctgattaagggacacaaaaatgatacctgttttcataaatggtttgagctgggtatcgagaataagctgcgtctgacaggcttgtatgagtcgtatctcattacgatggatgacaggcagatttcccctgtgccaaagattatccagatgtatttcagctatgataataagctgccataccgaaagcttgcagtgctttacaataatataattgctgccaaggaaacagagcctgaggtctaccacaagtacaggaaagctatgggcaggtttgctatggaccaggcacagcttaggcatattgatgacaatctggctgttttatacgaggatatgcttgagttgggattcatcaatgaagagctttcggcagctttttcagatattatatatacccacaagcttattgtatttgataagcgcatagtgagagccatcatatatcagaatgaaatgaaggagcctcagatagttccggttacagaccagtgtgcttattttgaactgttttcaaacgactatgttatactttttgaggactcaaggggctatagatatgttaaaagcatctcttacagactgcagaggctgatggatgccgagaaataccttgacaggtgtataagcctctcgccagacagaccacagtatatagtgtcacattttaagaatgtaagggattattctgattttacaaagggtgatttgaagctgtttaaacctgtattttatagtgaatccttttctgattcctacaaagctgttatgggatacagaattttaaaatattgtcagcttcacgattatgaggattacgtcaggccgtttctgcaaagcattgattttgatattctgcaaaaggatgcaagaaaatatcttattgacatgcttgtatcaaaccgcctctatgaaaaggcatatgatatggccatggagtatggaatagacatgcttgctgccgcatcgcaggttgttttgtgtgagaatgcgcttaaggtgcagcatgtagatgatgattttatggtgcagcttgccatatctgcctttaaaacaggcaaatacagtgacctggtgcttaaatacctgtgtgaaaactatacagggcctacagacgagctgattaatctgtggcatgccgctgacaagttttcaatatcttccatgaagcttgatgagcgtattctcgaacagggtatttatacgcagattgagcctgaaaagatatcggatatctttctggaatactataaaagagccggaaatgataagctgattttagcttatatatctcttgtggcacatggatatctgcatagtggcatgtgcaaggttgattttatttttgatattatcgaaaagcgatttattggaaacagaacattaaatgatgcctgccagttagccctattgaagcattttgctaagaaaacggatatcactcaggctgagcttgagattgaagatacattgcttaaatattatatatataacaatatgtattttgatttttttgcgaggcttgattacagactgctgaagaagtatttcatctatgacaaggcatttttacagtatgagagtactccgggggctcatgttgtgctgcattacagccgagacgaggatggcgaagagtttaattcagaggatatggttgagatgtacgacggcatatacgtaaaggcctttgtcatatttttcggtgagctgatcaggtattatattactgaggagcatgacaacagcatagaggtgaaggagagcaatcgtcttacatgcagcaatataccgggtgacaatgatcacagccgctataatctgattaatgagatgataatttcagatacactgtctgatgagacaaccttaaagagcaatatagacgaatataaaaggctggatgctgcgactaagcagctgtttaagctgatttaagaggatttataatgggacataatggcaattcatactatataggcatagacttaaatgacagctatgctatggttagttattttcaacagaatatgaaagagccggagactgtcagcactgttgcgggcagtgaggagtttcagattcctcttgtacttgcacgccgtaagagcattggcaaatggtattatggagatgaggcaagaagactctctaaaagcggtgagatggtgtgtattgaccagctgcttaagagagcactgaatagtgaaaaaatagtcattgacgatgattcatttatggcagaggagcttttggccttgtttcttaaaaaggttatggaactgccatccaagcttggtaatccttcatcctttgacaggcttgttatatgtgttgacaggctgacaaaggagaacgtgagcatgttttatggcatggcggtcaggcttggcataaattccagacagcttacggtcatagaccgaaaggagagcttttattattttgcactgaaccaggacaagtcactgtggcttcatgatgtggtgatgtttatgcaggaaaaggagagtatatttttttattccctaaagagggatcttcgcacaacgccacaggtagtatctatagatgaaagcataagctatactctggataaaaatgataaggataaaagctttttggatataataaatgagagctttaagaatcagattatctcaacggtctttctcgtgggagatacgtttgctgagggctggatgaagcagtctgttgcacttttgtgcaagggcagacgagtgttcatgggcaataacctctttactaagggagcatgctacgcggcagccacgagggataaggaagcagaatggccttttgtatatatgggcgagaatgagatgaagttcaatctgagccttaaggtacatgataagggagaactgtcgttttataatcttatcagtgccggaagcaactggtttgaatccaaggggcagtgtgaggttataatttcaggctcttatgaggtggatttctggaagcagcttcctaaaagcagggaggcaaagattgagacactaagacttacggatatgccgcccaggccggatagggctacacgcatcagaattacggcgacacctgtatctgatgacaggatagatatagagattaaggatttaggctttggcgaaatatttatgagctcgggcaaagtctggcactatgagatgactatgtaggagggcatatgggagaattattactgtgtaatgaagctatagcagccatgccctattacatagagggtgtgtctataaatgtttactcgatagaggagcttaattattatataatcaacaatacatatcttttggatgatgacttcatgagtcttgagctgtgcacctggattgaaaaccatgcacatctgccaaagcttgccatgcatcttagaaccattatatccacaaacggcagactgtctgcttttgtgactgagctgcttgagtacagcggctactgcactaaggaggagcttaagaacacacatgatgcacttaagaagcttgaggaaaagagcgagtttgagtgcttgaaaatcagggcagacagactgatggagaagaaaaagtacactgcagcaatttttgaatacaaaaagctgctgtcatgtgaggatgcaaagcatactgagcgtgtattgtacggaaacatatatcacaatctggctacagcatatgtgcagctgtttttatttgatatagcagcggatttatatcttgaagctttcaggcaaaatggggacagaaaatcactgtggtcttgtctatatgcctataagcttgataataacgccacaggatatgcccgtattgtcagggaatatagtgttacggagcaggaaataaataatctggacagtgtattaaagggcgtatgtgcagaagcttcagatggttgtgatgagggcagacaaaaagaaacaattttgaaatacaaagaggattacagggcgcatgttatttaaccgcatatcaaagctattcatatgaggtaataaaatcgcagagcttgatatggaagttcaatcttaggattgataaaatttccatattgttatataatttcaaattgaaaaatgactaaaaaatattaatatagaggagcacattttaaaatgagtaagattagaacaagatttgcaccaagcccgacaggaagaatgcatgtaggaaatttaagaacagcactgtatgcttatctgattgcaaagcatgagggcggtgatttcattctccgtatagaggatacagatcaggtacgtcaggtggagggtgctgttgatattataaacaggacactcaaagagacaggacttgtccatgatgagggacctgacaaggatggcggatgcggtccatatgtgcagagtgagcgtgtggcacagggtatctacatgaagtatgcaaaggaacttattgacaagggagaggcatattactgcttctgtgacaaggagcgtcttgacagtcttaaaacaactgttgcaggaaaggaaatctctatatatgacaagcactgcttacacctgtcaaaggaggagattgaggcaaatctcgcggccggcaagccatatgtcatcagacagaacaaccctacagagggtacaaccacatttgaggatgagatttacggagatatcacagtagataatgcagagcttgatgatatgattcttatcaaatctgacggatatcctacatacaatttcgcaaacgtagtagatgatcacctgatgggcatcacacatgtagtcagaggaaacgaatatctttcatcatcccctaagtataacagactttatgaggcatttggatgggatgtgcctgtatatgtacactgtccgcttatcacagatgaggagcatcataagctttcaaagagatgcggtcactcatcctttgaagatttactggatcagggattccttacagaggctattgtaaactttgtagcgcttcttggctggagtccttcagacaatcaggagattatgtcacttcctgagcttgttgagaagtttgattatcatcatatgagcaaatcacctgctgtatttgacttcacaaagcttaaatggatgaacggagagtatataaagaagcttgactttgacaaattttacgatatggcactgccatacattaaggaggttgtcacaaaggattatgaccttaagaagatagcaagaatggttcagacacgtattgagatattccctgatatcaaggagcatatcgacttctttgaaaagctgccggactatgatattgccatgtatactcacaagaagatgaagacaaacccagagacatcacttgaggtattaaacgatgtggttcctattcttgaaagctgtgatgatttctcaaatgattcgctttttgagactcttaaggcatatgccacagaaaagggttataagataggctatgttatgtggccgatccgtacagctgtttcaggaaaacagatgacacctggcggagctacagagcttatggaggtgtttggcaaagaggagtctatagccagaattaagaaaggcatagaaaagctttctaataactaatctattaacaaagggtattttatgaattttaacaaagcccagcatagcgccatcgaacacaaggatggcgctatgcttgttttagcgggaccgggttccggtaagaccgcagttatcacacacaggactaaaaacttaataacaaagcatcatgtgaagccttctgaaattttagttatcacctttaccaaggctgctgcaaatgagatgaaggagcgttttaattcactgatgaaagacgagagtgcaaattctgctcgaacggtacgcctattccgaaatcggcggtacattcattctgatttagtggtacgcgttttctgctgctgtggaagtcttgaaactgcaagtaccaaaacagcaaaattcccttgaggaaacacagcaatggctcacagagggtggcgtgatttctgctgtcaaaagtttctatttcttggaagaacatgacgcattaggtggactggaacgggtgggaactatgcttgataaggcaagatacagcacttcagtttcatcgtttcctttacgacatcatcccagttatattttttgcaaataaagtcagctgcctgtttcttcatttccataaccatttcaggatgatcacaggcattttgcaatttttcttgcaagtcctctacattcgacttttggaaaatcaatgccttatcttccacaacctctgcacactccggaatgtccgaaaccagacagcaattgccataactcatagcttctagcaggctcaagggcattccctccaggtcagaaggtaatgtgtaaatataagcattgctatataattcatcaagcatctgtccctgaacaaatccggtaaaaatgattctattatcatcctttgccagatctttcaattccgccataaaagaatccgtatcgctagagccaccagcgataaccaattttttatctgttttgacatctttaaatgcctcaaccagatatcgaatgcccttttccggcaccaaacgaccaagaaacaatatgtatgaatcctttgttagaccaaatttttctgttatgaattttgcatctttaatctcttgtcgattcacaccgttgggaataaagtgagtctccctaccataggtatctttaaagtagtcatgaacgcccttgcttagcacaatgatttcatccgcatactttacggcattcttttcaccctgccggatgaattttgagccaaaccctaattaccatttctcacgctgccagtctatgccgtgaattgtaaccacaaccctctttccaaacatctttggaagccatgagaaaaaagctggtccctctgcatggatatgaacaatgtcatacttaccaaaagcacaacataatgctgcaaaaaaagaggatgaaacagccgcaagacctttcttttctattgttggaactgtcttaagctttattcctttatattctttaagtcgttttgaatcatactctgaaccacttacatgatggccacctctgttgtagcaagtcacattgtgtccttgggcaaccatccttgtgcaaagttcctcaacaacaatctcaactccaccttctcttgatggaattcttttttgcccaaacatagcaatattaagtttttccttacattgcgccatcatttcttaatactcctacggcagtctgccaaataatcttaatatcccccttcacactccactcctcaatatactgggtatccagcttcacgacctcttcaaagtccgtgatattgcttctgccactcacctgccacagcccggtcagtcccggcctgaatgacattctggctctgtggtgtggttcatacttctcccactcgtcgagtgtcggtggtctagtacctacaaggctcatatctcctttgaggatgttccaaaactgcggcagctcatctattgatgtcttcctgataaactgtcctatgccggttttctttgttccatccggcagtatcttattgcctatgattctcgggtcgaagtccatcttaaacatcattccgtcgctcaccttgttttgtgccatgagatccttctttcgctcctcggcatccatgtacatgcttctgaatttgtacatcttgaactttctgccgtttctgccaattcgctcctgtgcgaagaagattggtcccggtgatgctatatagattgctggtcccacaaatatcgtcactatcaaggtgatgatgcatccgaccagccctccgagtatgtccatgcctcttttggcaagaagctgtgttgttctcgcatagttcaagctggctgtgatgactgtgtagtcacctattttttctatctgattaaaactgcctgccatgaccttgtttttggtgatgcctctgtgaacagctattcccatctccaagaatatgtctgccatttcgtagggatattcgctctccgcacacggtgggataagcacctcgtccacccattcctcacaagcgtagtccactatcccgtcatggtttgcaactattggtatttcacatattgttttgccattcaggtcggcatctgttgccgctgccactatctgtgtatatccaaaaccattttccttaagtccctgaagtgtctccctaaggagcttttccggtgctatgacaaagagtgattcttttgatgaagcaaagcctctttttttaattattttcttaaacaccattctgcctaagtacgacacgagaatatatattggaatcatgatgtagtaagacatacgcgaatatatctcacccatctgtgtggtaaacaggaagaaggttgttattatttccacaaataccacatgcttacatgtaactatgaactcatcgagatagcctcgcttcaatacatttttgaaggcatcggatactatttccacgaagaaatctatgagcaggaatgctactgccagtatcctgtagtctttatctatgtatggattgccaagtccaaagcgccatatgtatgagactatgaatgctatctgcatacacaggacatctaagagcatgaaatctatatgctttgtccagcctcttcctttctttctgtacatttttgtgtctccctgtatttcttgattaccctatttccagttcatccctatgctgtcgagccttgctatgcgctctgtgtcgagcaccatgccgctggccttcgggttttttcttttgcatctgatatttgatatccagcgtcccagcttcactccgtctgtggaatatgataccggcacgtctagattgccgtttttctcgtaatatgctttcgcaagctcaaactttctgttccactgtatagcggtcttgctttctgacctgtagcctatgctctgcaggcgctgtagctgctcgtctgtcattgagtggctattggtctggtttgacagccaccgtccaagcggtatgccgtctgctgtgacgtactttgcaggtacttcgaggtttccatactccttgtagtaggctttggctgcgctgtagtactcttcccacttctgcttgttgtggtcccatatcatgccaagctcctcgagtgcttttctctgctcatcggtgagtgcctgctctatgccgtacttttttaccttgaagcgcatgttgttgatccatgagccaagcctaaagcctgtaggcgatacgtatttggctttgatgtccagattgccgtagatattgcgatagcttttaagctcttccagtacctcctgccagcttgagtccatgacatcccatatcatgcctatgtcgtttagcttttgtatcttttcccaggtgaggtttccggatatattgcctgacttcacacgcctctgggtgtttatccatgctcccagtgtgaggcctgacttagttacatagctctttggtatcttgagatttccattttcctcataccactgctttgctgcctcatagtatgtgtcccaggcacttcccagattttcctgcaggcgcatgaatatctccctgctgtcctttgtctcatctatgatgcggaacctgtcgtcaaagtgttctcttggcgagtgagtgtccggatacagtaaaaatgcttcctgcatctcgtttttcaggcagtctatgcagtagagactgtcgaagttgttgaccaggtcaaagatgaccggctggtttttgcttcctgctgacagtgctctgcctatctgctgcagatagatgattggtgacactgtagggcgaagcagtattactccgtccacatcatccacatgtataccctcgttcagcatatctatgcagtagaggagctttaagtggcttcctgtgtcctttttgaattcggcaaaggctttgctggtcgacgcttcgttgtagtacgctgtgtatatgtgtggctttttgtccaccttgctaaaccagtcggccgcctgcgccttcatctcatccatatgctctctgcctgagcagaatactatgtatttgccatcaggctttgtcatctgtctggcaaagacctctgtgaggccgtctgcctgctcgagtgcacgctttagctgttctaggagcttttcgttttccgatacaagtcccgggtttgataagccttcgattcgctttttcagttgttcaagctctttcttgtatgaatacatggctatgacatatttaggctccggaagtatttccctcacgattgcttctccgagtgtcatctctgaggctatgttgccctcaaagagctcctctgccatattgcgctggttgtccagatagcgtatgtttgtcgctgagagccccaggcgctttgccttcggatatgcttccagaagcttactcacactcttgccccactctgcggctccacagcggtggaactcatcgagtataatatagtcagggtgcagggtgtctatgctgtcctcatgcttcatgagcctactgtatgacatgtattctatgtttgagaactgtgtgtctatgttttcaagctgtgtcttgtagatgtactcacttggcgatagccatagaaagtacttgtgcggatgctgctccacgagcttgaaggctatcatcgacttgcccgtgccggtcggatggatgacggctgccatctgcttttcctccagcatggtctcgactgctctgtatgcatcttcgttgtgcttgtaaagatgtatgctcatttgctgcctccgggtgaaacactacattaaaagggaggttggatttcgcagattattacaatctgcgaaatccaaccttccttatgtataaaataagcattttatataaatatgaccatttttctgaccatttatgggataactatagaattgattgcggagcgtttggtctccagatttggatgcacatagcgattcaatgtaatatttacattggaatgtccaagaatctcacttacactcttagcgtcagccccactgctgatacagtttgtggcaaaggtgtggcgcaatgcatgaaagtgagtattcccgatacctgcttcttttatatagatatgaaatctattctgataagtgcggggatccataggctgatttttctttagaaaataagagtcacctttcattgaagtgttataataatctgacagcttgtcatatataaagtccgggataggaatctcacgaagtgaatttgaagtctttggtgaatctatatataaagaagtctttttcgtggctgtgtggttattttgtgatgaatcggatgtgtgtaccgtatctaccggaagtctctgcactgtgcgattgacatgcagagtgcgactaatcatgtcgatatcttcccatttcagggcacaaatttctcctaaacgcagccccataaaaaggcacaataaaataccgagcttatagatatcaagctcggtaagaagatactcggttagcttttgctggtctattgtattgattgtatttatgttgtttgaggatgtgacggatgaacgttttgctctgtacgacagatgaatttctccggtaccatatgtggcagctccatatgcaaggattgagttgaatatacaaagtatgctctttgtaacgctctcaccggctgtctcaggcaactccttgagtatttcattctgatttaactcatctatgacgctttctccccagttcggtttgatatatttattgtatatagtagaatacttttgaatggtagagcacttccggctggatgctatactttcaagccatttctcagcgactgcttttacggtgatagcggactgctttggggctgctgtttgattaagtgaagcagcttttgctgtaagcagcctttctgttacttccttatagctgtggccgtataccgatttgcactttttactgccggctgtgtctactatgtagtaacgcccctcccagcgtccgtcggttctctttctgatgttggttcctcttcttgacatgtctgtttcctccttaaaaaatatatatgtatatataatttataggaagaagaatattaactccatataatatcttctgttttatttctgaccacaattttgaccatctaaaacaaaaaaatatataaaatccaacctaatattttattaaaattttatatctaattttcgattatccgcataaacactatactttcaagtattttgaagtatagaaaaaactcattttatatcaaatatattatgaagaggatatactggaacatcgtgatgatatcataggacattatagaatcagttaaacaactcctgatttttacaagtaaaatctttccagttttgttttaaaaaattgaatcaatggaccgttgaagcaggcatttataattgtaccaatccctactaccgaccagatacctgccccagatgcaatggcaaatatgattccgataatcacaacaacaacatctgaaagaacccttgctttatggaatggaattttctgatgtgtcagtttctcgattataattgcgacgctgtcatatggagcgattcccatatttgcgaccatatataatgccactcccatagatgccatcagctgagcaagcagcagtgcaatgatacgcagtggcagattcatctgaatctgcactacatcattcgctacataacaaataaagtctgcaatgtatccgacaaatatcatattgataatggtacccgcaccaatgcaggatcttgcctgaaagaatacaactacaagaatgatcgcattgataagtagctgccacgttccaaaactccatccgataaacccgctgattccaagattcatcgcactgaacggatccacaccaaattgtgaaagtcgtaagaaagatacacataatcctatgaacaatattcccagtaccattccgatgattctttttgtcttcgtcattttctatcttacctcctgaacttttttgcctttcagcatatatattctagattcaaaatcagtacaaggagtcacattaccaggcacttcaccagctgtcgcatcggatgtgatcaatccataattcatcaattcatctccgtaattttctgtatggttccatacattttcataaatcatatccgggttcaatccctgtaatctgacacggctatacggctgattcactccatttaaaacacgatagtagcctacgattgcaagcgtgcggtcttcatttgtcaccatccataccgtctcatttccttcgaatggacttttcagacgataaaatgttccaaactgtaacacttcccggtattctttcataaatgtgatctgttcttttacttctttgatctcttcttctgtcaatttgttgagatcaagttcgtatccaaaagttccaaagtatgctacattcgctcttgtatgtaatggggtattgcgaaatacctggtgattcgggacaacagacacatggcttcccatactgctgagcggataacacatagaagttccatactgaatcttcagacgctcaattgcatccgaatcatcacttgtccatccctgtggtgcataatacagcattcccgggtcaaatcttccgccaccgctggcgcaggattcgaataatacttttggaaactcatttgtcaaacgttcatacagatcatatacacctaaaatatagcgatggaacacttctccctgtctgtctgaaggaagtttgctgctgtagcattctgtaatgcttcggttcatatcccatttaatatatgagattttcgactccgataataactttgccatcattccgtaaatatgatctactacttcttttcttgaaaaatcgagtacatactggtatctgccgtgtgatgtatttcttcccggtgtctgtaagatccagtctggatgtgctcgataaagatcagagtctttatttaccatctccggctcaaaccaaagaccgaattttaatcccagtgcttcaattctttctgacagacctttgatgccatttggcagaagctcttcatttgctacccaatcaccaagaccggctctgtcatttcttcttgcgccaaaccatccgtcatctaagacaaacagttctactccacattcttttgctttctttgcaatctctacaaggcgatcttctgtaaagtcaaaataagttgcttcccagttgttatttaaaatcggtcttgccttatcacgccagtatcctcttgcgagtctcttagcatacagcttctggaatgtctgactcatgccatttaatccattttcactgtaaaccagaactgcttccggtgtctgaaagctttctcccggttctaatttccaatcgaatccttccggattgattccggctgtaattcgtgtcacatcatgtgtatctacttctgcctgcatacggaaatttccactatatacaaggcttattccaattgcttctcctgcattttcatctgtgttgtgacgttttaaagcaaggaacggattatgttcgtgagaagaatttccgcgcatgctgtcgatagctgttatgccttgctccaatgttcgattcttaatatagcgctctctggaccacgcaccggacaactgcatccattcataatccttatccggaagatccaggcttaagctcatcatatttaatacatgcagatttttctcaccggcattttcaatataagcacttcttgcaattgcactatattcatcaaaaatcgtatataaaagcgccagttttgcaccagtcaaagcgtctttcaggaagatgcgcaatgtctgcgcttcctcctcggactctgtgtaagttgccggcaatccggagagtttcggttttccggcaataatctcatagctgtcatattggaactcactgatcctgctgccattttcctgcaacaattcaattgccgggtgtctgtagtctgtcgtaccgtaaacaggatattcctgtcggatatgttccaatgaaaaagtacgatcccattcatatatatatgatgtcattgggcgtccacatttttcaaccagataagaaaaatctgctttatcatgaagtcgttttccaaaatataattgtcccagatgtccattttctaatacacataagatataactgattttttcattgtataaatggaaagtttttgtttcctcgtgaaaaataatctgtctcatatactacctcttttacaattgaacctgtgtacttgttccttatgtttgctgatacaagtatagcgtacaaaaaaagcatccgttatacctttttgttaagatttatatctcaaatgttaggtatcagatacttttttaacattttatctattctttttcgatgtttcctacataaattgttttatgcttcttatattctttcagttcattttgtgcacggatcaatcgttcccgggcatcctttctgttgtcattacgatattgggtcggcgttattcccactttctgcttgaatactttaccgaaagcaagggaattacgatagccgcaggaaactgcaatttcctccacagacagatttgtaagtgcgagttgctccttacctctggaaattcgaaattccgtcaaaaaatctttcggagagattccaagactgttcataaatattgtatataaatagcttcgatttagtgccaaataatttgctatatcttccactgtgattttctgtgaatagtaattctttatataggcaattgcttcctgcacatgtatgctttcttttgtatcattcgaatattgctgaatttcaatcccacgagccagtactgagaaaaactgatagagctttccctggagatagtaaagattttctgcagttgaacgcgtatgatgaagcatttcaaatacaatttctttcagttcttctccatattcacactcgcatataagctgacgactgttcagtccgagatctctgacaaatctctgtgcttccgtaccaccaaatcctacccaaaggtaagaccatgggtccgttttatctgcctgataaaaggtaaggctttccggctcgatcagaaaggcctgtccttctttcagctgatacttcgtttcacctacctgatagatacctttgcccttcattacataatgcaaaatataattgggtcttgcggccggtccatagctatgtaatggcttgcattctgcaaatccgcagaaacacaaatgaaaatctttaaactttggttttaatagttgtaatacgtaagaatcttccataatcagtatcctctcttaatcctgcttacgtgctcttcatgtctggtttaatggttctttttcctgtcaggcacagaaaatctgcaagtcttccgggaaaacctttatctaagaaaaaaatacaatattaacatgaatatcatgaatataatattggaggctgtgaatatttccaaatacttccctctcagattcctgttttcttttgcaatatatttgaaacttatcaggcttgccatggatgcaatcagagtgccgagacctccaatattggttccgacaattaaagcccggtaattatctgtaaagccggataaaagaagcgcagcgggaacattgctcataatctgactggcaagaacagcagtaagtgtttcccttcctgccatgattctttccagaaaactgctgaattgcggaatccttccaaggttgccgataaaaataaataatgcgataaaggtggcaagcagtgagtaatccaccctgcttatattttccatgtttcttagcagcatatatataagaaccaatacaagaggaatctggtatggaatgatacgtgcaacagtgagcaggcagattgtaaataagatcaggtaagcgaccaggtattctatgttaagttcttttctgtcagagaatcccaaaagagttttatctttttcggaaccgcatacgtgaggtgctttggcagcggctatctgtatccatatcagaagaaggataagtgctgtggcggaatagggaagcatcagggttattaatcctgccgcggacatccctgctctggcatatagataaaggttctgcggatttccgattggtgtgagcatgcttcctagattagcagcgattgtctgcatggctactattttaagaagccagtaattgcccagttcctttggcagtttatgcacaatgatcagtgcaagaggaacaaaagtaatcaatgccacatcattggtgatcaccattgacaggaagaaacataagagtaccaacagcctcatcacacccacagttcccgatgttcccatcagcaatttttgggcaagtatatcaaaaacaccaacagccttcaaaccagctacaattgccatcaaacagaagaggagcccgagagtcctgaaatcgatataagtaaaataagccttatccggtctgacccagaacatagaaagaatcgtcaggatcactgcaattgacaaaacggtttctttcctgaaaaaaacatataatttttgtaacataatatttcctttccggtctgatacgaccgcatataagtatatcacagaaatatccagaataagaagagttaatattttggtcgcctcgtttttcttttatgcagctggaaggaatttcgattccttcatagctatattggggatgtttggttctggcaataatcattttcgaataagaatctgaagcagagcatgggagtacttgttgctcttttatcaaattttgtgtatattatagtaattgtagtgggatacgtagcgtgtaggtgtttgaggcactttagcgatctgcgatgatgaacccagggctgtactctgtacggtgcaggaaactgcggttgtaagacagtgtagattacagattgcagaataaattatagatagaattatagatagaaaggagtttcaggattaaatatggcagaaataaagaactcggaatcagatatgagcactcagcagaaagctgagctggacaaagagaaaagaaaagaagagaagaaagaggcaaaaagagcaaaaaggcagcactacagggaactgaatgagccaccaaaactcaccgtgcttgaggaagtgggaaatgcagtcacccatggaataggagcaggatttgccatagccggctttgtccttcttctcctgaagtcagacacagggatcaaagtgatggcatcgtgtttttatggaatatcactgatattgatgtttcttatgagctgcctgtatcactcatacaaatccgggctagcagtgaagcgtatctggagaagatttgactattcctcgatatatctgctgataggcggaacatttgctccgatgtaccttgtgtactgggaaaatgtgcttggaatagtgttgttctgtgtgcagtgggcgctcatcatagcggggatcaccatcatatgtgtgttcggaccaggcaggttccgaccgatacactatacgctgtacttcgtcatcggatggagcgccatcatgttcattccagattggttcagaaatgacaagccgcttttgggatggatcgtgggcggtggtattgtctatacgctcggcatgattccatttgtgaaggacaccaaggggatgcactttatctggcatatctttgtgatgctgggggctgcgctgcattggtttggaatgtacctttatgtgtattaataaaagatagataagttcaacagtgcttcgaggtctgagactatgacaagaaccggagaatatcttggaaaattatttgcacacatgggaaaggagtgttatatagagccacctttttattgtgactatggaaccaatatacacgtgggagattatttctatgcaaatacaggactgatagttctggatcagtgtgatgtcatcattggagatcatgcatttctgggaccaagggtcaatatatactgtgcatgtcatccgatagatgcgatgatcagaaataccggtgtggagcttggcaagccggttacaataggcgataatgtatggatcggtggcaatacggtcatcaatccgggtgtgaccataggttcaaatgttgtcataggctcagggtcggttgtcacaaaggatattccggatagtgtgatagcggcaggaaatccatgtaaagtcataagaatgataacaaataaagataaggaatattggcttaagcagctagaggaatttgaggcagacacaggtgagcaggtaaagctggagcaggactgattcaacattgctgctgtgagttgagattccaaagcgtttttctataccacacatcctaatgaagagccaataaaaggtataaaaaagatgaaacagactgataactttaagttcgacgaggcaaatgttatgaatgaattagtatatagaaatctatcagaagatgcaaaacgacaaatatgtgcatggaaatatggcggagaatacgatttgtataatcttccttcttatgaagaaatgcaagttcgacagataggattcatgaatccccaaaggaaaaaaaattattatggtttttgggatgaaagcatattggtaggatttgtcaatatattggaggaaaaagaagagatatttatcggaataggcgtaaatcctgatttgtgtaataaacattatggtcaacgaatgctcttgattacttatgagatttcaaaaaagttatatcctgacaagccgttgtatctggaagttcgtacatggaatatcagagcggtaaagtgctatcaaaaagcaggatttaggattgatggacaagcttatgagttgacaacaggaattggtaccggaacattctatcgaatgataagagaataggaaacagcacatgaaatatgataagatagtggaagcatttttcatagaacgtcccaatcgttttattgcgcgggtaaagattgacggagcggaagaggtagaattggttcatgtaaagaatacgggccgttgtcgtgaattactgctgccaggggcggaagtgattttggaagattgcatagaaaagaatccaaatcgaaagacacgttatgatttgattgcggttaaaaaattggataactaacattcagtcttgtggagagattgaaagcaacagaagatttgaagttataagaagtggaaaaggaggacaagttaatgataaaaaaatagccattgtaccctatgtaactaatgggagaaattcacaggttggacatgatgaatatgaaagcggaaatatagatagagtagtgaaatacatagaagaaaattgaaacataatctcttagaggagcttatcaaatttaaatttgaaaaatttaatggtatcgggcaccaaaatttcaggggttgcggaaatacttggagacaaggtcacatttctcgcagagtttgcactcaggaaggcacttatcagaatagatgtggcacagcatatgtaatcataaaatcccggatatcatgcgcatatcctatggaaaattccgctaaaatatgctttaataaaagatatatagcagtaaataacaattgcaagaggaagaaaatgtctagaagaaagaggcagaaaaccggaatgataaataatgaaaatgaaaataacagcatgacacaggagcctcaaacaccacagcagacagttgacgcgcagcagatagttgtcccgcaggagagcgagcgcatccagcgggccgagtggattcacgagcaggtgaagcttcagcgtgaggcagaggatgaagcctgggagaagatcatggaggagcagaagctgcttacagagcgcagacgctccatagatgctgatataaacagcaacagggagctgaagcgataccatgaggactgcatggaggatatcacagaccaggtatattcactgcatggcatatcggtagacaagctggagggcataaaagagtacaggaatgccctgttccgcggagaagcattcatagtgttttgcatatctgtaataatggctgcgattgtggcatatgcctatgggccgacttcacagctgtgcctgtatgtactcatgtgtgtaggtgcggagggagcgttattgtcccaaaagcgaaagaatatactgtttttcatcccgcttatcctgatagcggcggagatggcaggctacaagctgtatccgcagtatctggagtatgtcacgatggctggagaggcactggcgctgcttcttatgatgataggcactgtgggatactttgtgcacaatccataccgcaaggacagaaaaaatataaaggctgcaaaatcagatcttaaggaactacataaggttgctaaaaagagcgtaaagaaaaataaaaagagccgcataaagaacgaagcaaaagaagcaaagcttgcggcaaagcaggtcaaaagagagaccaaggctgccataaaggagcagaagaggcagaataagctcgcaaagaagcaggccaagtacgagcttaaggagaaaaagcgacagcagaagagtgagcgtgttgagcttaagcatgagctgaagaagactcagctcatggataaggtgagaagatttacaccgaaggagcaggagagtgaaagcacctcttcggcagagagcatagataacaacattacagaaaacaatatcatagagaataacatcattgatatagagcgcaaggtcaattaatcatggatgagcattaggcagacagctgatacttctccatccagtaattaatctggatgaaatatgcgataagctgtggacctgccatgagctggccaaaccacggactgccgtattctgccggtgcctttaaaaattcgcgcgttttgtcagtgtcaatgagagtgcgcacaggggcgttagggtagtctaatatctcctccattccctttataaggagagcttcatatccgggatgataagtctttggatatgggctcttttttctgtgcaaaagctcaggtggcaggacatctgaaaaagcatcgcgaagcagagtcttttccacaccgttttgatatttcatatgccaaggcacattaaagacatactcaatgatacgatggtcggcaaaaggtacacgtgcctcaagctctgagtacatgctggtgcgatccatgcggtcaagaagcgtctgcatgaaccatttgatattgagataacctattatgcggcgactttcgtcctcaccggtctcatcgtaaaggagaggggcttttgatctcgactcctcatatcgaaaagcctgataaccggataaatcaagctccaaacccacatcatcacgcaaaagagcaaggcgtggagcgacatccgatgaccatgggaagccatatctttccagcagctctttgcggtaaaaccacggatatccgccaaagatttcatcagcacactcaccggtaagagctaccttgttttttcggctgacgaggctgcagaaatataaaagtgacgagtccacatctgtcatgccgggcatatcctttgcatcaactgcggcaaagagcgccttgaagagagagttttcatcacactcgagataggagtgggctgtctcatactcttcaagcatacgattgacatagggcagatccctctccggctggaaggcgtttgccttaaaatacctgtcattgtccttaaagtcgaaggaaaaagtgttgagcgttttaccgcgtgtgttcatatagtttgcggcgatggcggtcacgatgcttgaatcgatgccgcctgacagaaaagtacataccggcacatcggaaaccatctgcctttttatagcatcctccaccagaaaacgtgtgtgagcaacggtatcccgatagctctcggtgtgttcccggcttgtaagctcccagtaggtttcatcatgcagcccatcccgggagtaaatcatgaagtgtcccggcaaaacctcaaacaaatccttaaacagggaaagtccgctcgtgtgcgcaggcccgatagcaagaagctcctgcaagccctgcttatcaagctcaggctttactgcagggtgcgcaaagcaggcctttggctcggagccaaacaccagagaatcccctcggatggcataaaaaagcggtttgacacccacgcggtcgcggtacaaaagtaaccggcttttagctgcatcccatatggcaaatgcaaaaataccgtttaagcgattgacaaaatcagcgccccaatggatgtaggcgtacagaataacctcggtgtctgaggttgtggagcatacaaagccgttttcggacagctcgggaatcagctcatcagtgttgtaaatctcaccgttatagcagattgtgtaatcatagccattgtgtgtgcgcgtcatgggctggtcgccgcacaggatatcacggatagccagacggctgtgcgacagaccaatatgctttttaaggtagcgtcctctggcatcgttgccgcggtgggcgagcacagcacgcatcttctcaagacgaaagttccagtaatcggtgttctcttcaaagtcttctttaaagttacagaatccggcaataccacacataaaaattcatatctccgtaaaaacagatttaatttatattatgcatacgccttgaagctgttaatccggtcagaaaataaaatgatatggtggacaaaagtcattgtattaatcaattaccaagctgattaataaatttttattgacaagaaaggcagaatagcgttactcttattacatgaagttagataacactaacatgtataaatgatagataactacagtaagtacaatctgaccggtaattgtttttaaagctataaccttatataaggtaaatgtaatttgaaatgttgaaagagaggatatcatatgtcagaagaagagagaaagttcttagaaatagtggatttgaaaaagggcttcggaagcggcgagacgcgccaggaggtgctgcgaggcatgaatttttccgtggcaaagggtgagttctgtgtgctgctcggaccgtcaggctcaggaaagtccacactgctcaatatcatcggaggcatcgacagcgccgattccggatatatcagcataaatggtgacaagctgaaggatatgagtgagaaaaagctcacacagtaccgcagaaagcacctgggatatgtatttcagatgtataacctgattgccaatctgaatgtaaaggaaaatatagaggtgggcgcatacctgtctgacaacgcactggatatcgatgagctgcttcacacgctggggctttacgagcaccgctataagcttccaaatcagctatccggcggacagcagcagcgtgtgtcaatcggtcgtgcaatcgtgaaaaaccctgatatactgctctgcgacgagccgacaggagcgcttgattacaacacctcaaaggagattttgaagctcatagaggatgtcaacaaaaagtacggaaacaccataatcatggtcacacacaatgaggccatcaaaaacatggcagaccacgtgataaagctacgagacggagccgtgcgtcacaacgatatcaatacaaataaggtttcggccgaagagcttgagtggtaaggaggatttgacctatgagcaggaaaaagataaaaaatcctctgataaagcgtataccaaaggaaattatcggtgactggaaaaaatatcttgttgtatttcttttcctcgtgctgacaatcggctttgtatccggaatgtatgtggcaaacgatagtatgctcacctctgcggatgagggggtaagtaaatacaagcaggaggatggacattttgagcttaaggataaggctgacagcgagcttgttacggctatcgagtcaggcgaggtaaaaacagctccagacgaaaaagacagcgatagcagcaaaactcctgtcacgctctacgagaatttctatcgcaatgagactgaggactacgacgcagacggcaaaaaggacggaaccatccgtgtatatacaaagaccgaggatatcaacctcgcatgtctcatcgagggctcttttccacaaaatgagaacgaaatcgctgtggacagaatgcatgcagacaacgtggggatgaaggtcggtgacacaataaaggtcagcggaaaagaatacaaggtatcgggccttatcgcatatgtcaattattccacactgcatgaaaagaagaccgatatgatgtttgatgcgataaagtttgatgtggcaatggtgacaaaggagggctttgaccgcctggacaagagcattcactatacatatgcatggaaatacaaggatgagccggcggacgatatagaacagaaggaaaaatcagatgactttctggaggcgatggtgtcacaggttatggcaacgggcaatgaggtggaggactacacaccacgctactcaaatccggcaatcaattttgccacggacgatatgggctcagacaaggccatgggaggagtgcttttagacattcttatcgtgataatcgcattcatttttgcagtgaccataagcaatacgatagcaaatgaatcatcagcgataggcacgcttcgcgcgtcgggctacacaaagggagagcttattaggcattacctttcaatgcctgtcattgtgacatttctggcagcagtagtaggaaatatactgggctatacggtgttcaaggatgtggttgtgggcatgtattacaacagctacagcctgccgacatatcacacaatctggaatccgggtgcattcataaaaacaacgcttgctccggtgattatcatgctggttgtaaaacttatcgtaataattcgcatgatgcagcacacaccgcttcagtttctgcgtcatgaccttaagaaaacaaagcgaaaaaaagcaatgcggcttccgcgctggagcttcatgagccgtttcagactgcgaatcatgttccagaatgtggcaaactatctgatactctttgtgggaatatttttcatcatggtaatactcgcgatggcagtaggcatgccggatacacttgatttttacaagaaaaataccgacagtatgatgtttgcaaaatatcagtatgtactcaaatcctatgtcgatgcagacggaaacgtgcttgaaaccgacaacagtgatgcagagaaatttgacatgacatcgctcttaaggagaacagatgagtttgacgaggaggtgtctgtctacggagtggaaacagacagtgcatacgtaaagcttaaggacatggattcgcttaagggtaacgaggtgtacatatcagattcatttgcagataaatatggtataaaaccgggtgatacaataaagctcgatgcacagtacgagaaaaaaacatacaaattcaaggtgaagggaacatacgataaatcccagagcatcgcggtgtttatgccgatagagcatttcgcggatacctttgattttgcagatggcagattcagcggatttttgtcggatacaaagataaaggatatcgatgagagcaatatcgcgacaacaatcacgatacgcgacatcaccaaaatggcagatcagctcgaccactccatgggctcatacatgcagtacttccaggtgctttgcatactgctctcagccgtcatgatatatctgctcacgaagctcatcatcgagaaaaatgagacagccatatctatgaccaagattttaggctacgacaacagagaaattgcaagtctttatctggtctcaacatccatcgtggtggttatatcagatatcatcagcgtagtgcttggtgcaaaagtaatggatattgtatggcgcataatgcttcagaccttcagcggatggttttcattccatatgacacctgtcggctatgtaaagatgtttgcgtttgtgctcatcggttacctgatagtgacagtatttgatttcagcagaataaagagaatcccgatggacatggcattaaagaatgtggaataggtgaaaagtagacaaaaataattggaggtttttgtcaggtttcaacgtaaatcagtcgtaaaagcagtaaaatgcttttgtggctgattttggtatttttgggggattattgattatatcagcaaaaacacgtattatatacatatacaaaaaaattttacggttcacgcctgagagtggccggtaacacaaaaaatcttaacatatgataaacagaagaatgaggtataaaaaatgacagacaattttgaatttagaagtatacacccagacgaggtagaacaggcaatagcaattgagcagatatgcttcccaccgaatgaggcatgttctccaaaggcaatgacagagagaattgcaaaggtaccacagctatttctcgtggcaattgacaaatcaaccggtaagctggcgggctttttaaatggtgtggcaacagacgaggaaaggttcagggatgagttcttcacggacatcgatttatgtgatgagaatggtaaaaatgtgatgcttctgggccttgacgtgctgccggagtaccgtggacagggccttgccagagagctagtgtaccgctacagtcagcgtgaaaaggcaaacggacgaaaaaagctgtttctgacatgcttagagcagaaggtggagatgtataagaagtttggattgcaggatctgggaattgctgactctacctggggtggagaagagtggcatgagatggtactagagggatgaatgtgataacatggaaaataaagtatctgataacgttatagaaaaaaattatagggagtgtcttaaattcaatgaaatcaacgaaagcaaagtcgataattttgacctggcaacagcaaaggctgcccttgaaaatctgtatgagctatacaaaaatggcatattaacaggtcgtttcacacaggataaggactatgtagtaaggtgtgctgacctggtaacattggctgaggagaacaaagacagcttgttttatgatgcatggcgcgtatggtttagatactttgtatcgatgggctatgcaggatggaatgagctgtgggaggcagtatgccgttgctccagacgcttaaggagctggagaaaaatggtattccaccaagtttgagatgaagatgcgccaccctgtaagagaggatctgcttcgatatctgcagagcaatttacaacaaagcatacaaaataatacacaggagcttaaggcaatatgaaaaaaatacgcgtagtggctgccggcggatgtgacactgattgagaagattggagaggcgttgtatgaaaccaaggacagcaaatagcatgaacatacaaattttcggaacaaaaaaatgcaatgacacaaagaaagctcagcgatttttcaaggagcgtgggataaattttcagtttatcgatatgaaggaaaaaggcatgagcaagggcgaatttaattctgtcgcccaggtgaatggcggtcttgacaatatgattaactgggatggcaaagataaggatttgctggcacttataaagtacatagcagatgaggacaagctggataaagtgcttgaaaatccgcaggtgattaagacaccggtggttagaaacggcaggcagtcaacaatcgggtaccggccggatgtatggaagacatggaaataacactaaaaaatgaaaggcaggaattatatatgtattatgtaccggatggcacagagcagtgcggttattatgagtgtaaggagtgtggaagcaggtttctggatttaaaaattgcaccaacattggtatgtccatactgtggagaagaggcagatatggagataggacctgatgaggagataccaaaagttgtagaatctgcgaagcttattcagatggttagaggcgttgaagaggtagagaagatggataagctgttatcgcttgcggtgacaggtggcgattttaactggatataagaatgcagatatttgtagacgcagatgtaaagtagctgtcgcagatgtgacattgattgagaagattggagaggcattgtatgaaaccaaggacagcaagtgctacatcatacggtgttcgaccaccaaggctttctcttggggttgaatttatgtggtctacgatagttcttaaatcccattgtgtgagatattcaaagctagtctttttaggaagaatcattcgaagcatggtatgtgtctgttcgatgccgcctttttgactgcttctcatcggatcacagtaatagatgcttgactgcataatgccattaatgccgttttcgagagactccggatctccgaattcggatccgcgatccgtaagaatcgtgttgaataaggttaaaaaatcatatatgccaagctggcgttccaacttgttaaaaacaagttttacggtacctttggtgcatctgttcataatgaatgcaagaaacagtttttcacgggttaagaagaatgtcaggattcctttatcaaggtaagaatatagagttctcacggatatatcgagttctggatgattcgtcataatctgatatggagactggccctgaaaaatcaggggcgtgatgaccatatcttcctgatgcagttcgtgtctggtcatgtttataccggcactggactgtgaaagacattctttgtatttgcgatcttcgagagtaagatgtttttgattaccgggaatatatttgctcatgctagttctccttctactgctgtcagaagggcaactgctttacattattcagaccgtgtgatatactatataaaattcgacaattgtcacggatatctgatgacaggcgtttgtcaggagttttgtatacagagaatacaaactgcgcgttggcgggatattgccgatgcgcagtcttttttagtgatgtagttgaggagagaaacaggtatatggggatagctcggaaaaaaaagaagaaaacattgaaggcaaaaatgcttggcatattgacgatgtgtgcgatgacaagccttctggctgcggtaattgtatcctatatggaactgagaatgatacagaatgacagtatagaggataacatgaaaatgtatctggatcagattacgaagaatacggatgaagcctattatgatatgatcagtattgtaaactatatgggaccgggcggtctgatcggaaacgtaacggacagttatcttgatgctgtggataattttgacaggtttgttgaacagagatcccttagacaagaacttttgggattaggatatgtcaacacaaaactggtaggcgctacctattatgacaaggaagagaaaaaggaacttatcagcggtatgaatgtcagaacactggacggaagacagaacgcattgcctaaggttgtgaagtgtgcgggaaatgttatgcaggcagcccatgcgtcttttcttgggagtagtgagaaaacagttttttccgtcatgagggaaggagttttgggcaatgggaaaaaactggaaatttacacagaaatagaggctgatatgaagaccccggaagaaataaataaggaaggatatccctacacttatattcagacggatgagagaggggttgcacaatacagcgtaaatcctgtcattatacagggacagaaactgttttctgcatcactctcaaagggggagtatgaagtccagacgagaaagggctataagatcatggcatacaggagtcagatgggatacattaatgcagtggcactgcctgacaatatatatcacaaggagagtaaccggtggaaaatgatgatgacactcatcatagttgtaacgtttctgatcttttccatgtctgtcttctatctttatcgtatgatctgccgaccactgagtcaattccgcagacagatggtgcagattggggatggcactcttcaggcagtacatgaagagtcggacattgcagagtttgacagcctgatgagggaagtagaacagatgaagagacagattgagaatcttatcagcaatatggtagaaaaggaaaaaagcatacagaagatagagtttgagaaacttctctatcaaattaatcctcatttccttctcaatacactgaattcgattcagtggatggcacaaatgagtcaccaaagagagatcagtgagtttgtacagaggctaaagaagcttctttcctataatctgggcaaagaaggttgccagacaacgttgcggagggagttggagattgtaaaggaatatattgcacttcagcagatgcggtatgattttattattgagattaatatagaagatggcagttatcttgaccagccaacggtccgtatgctttttcagccacttgtggagaacgcgatccgctatggtcttggggatgatgagaagatcagcatccaggtgtttgaagatgtggcaaggcattttgctgttgtaactatctctgacagcggaaagggactgaatcaggaggagattgatgagatcaaccagccgtttgattatgactgggaatactggaagaatgagaacagaggtatcggactgcgctacgtcaaggctatagccaatatgggtgtgacaccggaggtggctaatgccacgattgagagaacagataagttcagggcagattattacaagtactatacacacggaaactactggaccaatccggtgaactacgacctgacactaaacagtgagcgtgtcggtgtggaaaactgtgtgaagacgatagagcagtatctgatcataaagggctttatcaaggctgatatgattaagccggtgggagaactcatataaaaagtatataacaaaaaattgcagctcgtgtatgagctgcaaatttttttattatatgaaatgagggtcaaaaggtattttgccccctcatttatgattaatcatattactacatgctacgcattcccgtaatctgactacacctcgaaatccgctaatttcctgcgtgcccgcagcaaattactactttctcggtgtagtgcgggtcactaaggtatacatcgaattgcatgcaagcatgcatcgatgataccttttgaccccaagtaacaaaagaaactcaacgctgtcaaataacttatgatggcgttgagtaggaaaatcttgggaagttagcatttattctgtgccgcaagctccttctttctctcctcggcatccatatacatgctgcggaatttatacatcttgaactttctgccgtttctgccgactctctcctgtgagaagaatatcggtcccggcgatgctatgtatatcgccggtcccacaaatatcatgatgataagtgtgaacaggcagcccaccagtcctccgactatatccatgcccctctttaccagaagtgcgctgggatttgcatagttctcgcttgatgtaactactgtgtagtcgcctatcttttctatctgcttgtagccaccctgggctgtaccgttttttgctattcctgtatgtactgcaattcccatctctaggaatatatctgccattttttcaggatattcatcctcgctgcacggcgggatgagtacctcatccacccactcatcacacgcatagtccactataccatcgtgatttgcaactatcggtataccgcatatagtcttacccttcatatctgtatccagtgaagccgctactatctttgtatagcctatacagcttttctccactgtgcgcagtgtatcacgaagtattgcatcaggtgctatgacaaacagtgatttcttagatactccaaagttccttttcttaatgaagctcttgagcgctagtcttgctacatatgttatcgtcacatagattggaaacatgatataaaatgataatcgcgagtatatatcagccatctgtgtggtgaacagaaatagcgctgtcaccataaatacaagcactacgtgcttgcaggtcgatatgaattcatccagatatccgcgttttagggcattcttgaatgagtcttccattatctccacacagaaatctatcagaatgaatgctacacccagtatacggtagtccttatccacatatgggttattaaagccgaagcgtatcacatatgaaataaaaaatgctataacaatgcatgcgatatctataaacataaagtctatatgctttgtccattctctgcctttctttctgtacattctttccaaattctccttatgtatctttatttcccctatacccactccgaggggggtacctttgtacccccccccgaatatttttagtctgttttgttttttgtatatttattcggattagcgtatcttttgttgtatctaattggattttccaatgacttattttcaccttttttttattcattgtcaatgaatattaggttttctttacaatttttgacatattcgccaatctgtatagtattatcagctcaatattatacattatttatatgtcattctgcttatttttcctcaaacagcctctgcttcctctctatcatctcatcaatccttgcgatatactgccctgcatccttgacattctcgcatctgtcgatgcggtgtgtgccatccggattcggtacgggccagacacgcttggtgcttgcccctgctccgcaggccacaatcgtttgcttttcctccaaaactacaccatatcgtgtgctaccatatattacgcaatattatcgctttaaattaatcattgctaacccatatacagtgcattttatacgatttgatgtaaaattgtcaaggtgctccggctactgaaaagtagtcggggatttttctatcatacctaaaaattaagcgcttacatttatggcactctttctttaataaacgtcgttattatcttttcatatccctctggatcttttttataattctctgcatgtcctgcaccatgaactatataaatttctttactgcttttacaactattataaatttcttttgccatatataatggtgccaagttatccttatcaccatgaataattaaaatcggaatttttgtctgtgataccgacttacaagcatcagcctcttttaaattaaatcctccccaaagctttattcccacatctgcaaaaattttgaatacctctactggcattcctttaggcaaagagctcttacaatttaactctaacatttttgttgatgttgtaaatccactatcttcaataattccacaaacagaatctggcaaatccaaatcactactcattgtgaccactgctccacccattgaaattcccataagaaatatcggtgtttctcttccaaaatgttttgcagcccaattagcccaatctacacaatcataacgttccttcactcccaatgtgaaaatatttccttcactttcatcatgcgcacgcatactaacaagtaaaacattccatttttctttctgcgcaattttataaatcggcacaccatccacgtaactatgacttctaaacccatgaaagaagattactaatggagcattcttctttctctcataataatgaccttccaactttgttccatcagaagccaagataacaattttttcattatttttttgctttattttatatgcttcggtaagccactcatattgctcatcatctgctgttcccaaatctggccatgctgtttctcttcgttcacaaattttttggaacactaatttacttcctacccccaaaattattatcgaaaaaataaacattataataactactgcaacaatctttttcattttcactgatctctcagttattgcaagttgttttactctttgcttcataaaaatcactttccttcaatatttatcacatctcagccgaacataaagtcgacacgttgaactacagtatttcttcaaatctggactgcatcagaattctgtctatgccctccttaaagaggctccgacaccaactgccattgccttcttcgcttccagggatgcatttggtcatttacttttacattatatctaatcatgtttcacatcttttcaccattgcatcttcacatcttcgccgaccataagatcgttgccggctgtattttcgtgtgtaaaaaaacaaaattattttttgatatgaagtatctctaaaactaattttaccgcctgattcttcattattaacagaacaatcatataaataacaaccgaagcagtcactgaaaaaactgtagaaatcagtactgaactaatatatttttctgatatagaacatatagtccatattgccaggcatcctatagcaactgagagaatgtccttttttagaaaactgaccctaaaatattttcttccataccaccatgttataaccattgacagtaactccgcaataacagtagtaaatgccgcagcattctgctggaatgttggaataaggataaaatttaatcctatattaacaagagccgcaacaatcgttgccatcaacaccttattttcgcacctataaggtattagaatgcacgatgtatagaaccaactaaaaatgctaaaaagcaacgcaacagaaagaatcttaagcgatatatttgcatcaacatattcttgtcctgcaataataaaaactatgtttttgcttaatgcaatcaatccaaccattgccggaacgacaataacaacaagtgcattcaaaatctggttggctgttctattaaaatagtctatttttttctctcccagataagcagataatctcggaattgaaacaataataattgcagccagcatttgttttacaatagtgtagattttggtggaaacagaatacaatccaactgatttatttcctgaaaagaaaccaagcattgtagtatctgcattcgtatatattgttgtcgctactgatgttgcaaacagaactaatattggagccaaatgcgttagaatttttgcattaatggtaagtcttatcttacaatattttcttctagaaacagcattaagtatatttgcgccgctgcatgatataactgtgatccatacataagcaaacaaatcactgctattcctaacgagtacaaacataagtattaatgaaataaactgaaacaaaatgcctcgaattgtgatatatttatagtcctcataaatttgaaatatccattcacttccaatcagcgtaaacattatgcttatgcttaacgctaccattattgaactatattggttaaatcttggaactaaaaggatacacactcctaaaattagatacgaaaaaactgtcgaaataaagttaattgaaaagacctccgaagcaaataatgacatcttttcttcattatctcgatatcttgctccctctctgatagcataggtgctaattcctaaagccgccagcaatgaaaaatacgaaataaccgactgacaaaaattgtaaattcctatattttcaacatgaaggactcgtgatacatacggaaaagtaatcaatggaaaaatcacctgaaatgccgttctaatcatgttgagtcctgcattgacaccaatagatctttgatttctcattttttctcaactccttccacaatttttacataaaccgacattaataaactacgctatgtaattttctttttaaacagctagccagtatactttacatattatcctttttatcagttgctttattgacgaaaaagaatgatactgatttattaacggcttttccttcgtatgaagcccgatgccttatacagaaacggaatgtactgcgccgttttataaagaatagtcatttttattccaaccaatttccaaagaagcccacaagaacatactttcatagaatcaatgtaaaatttgcaatcacttttaaattcttttattttctcataaggaaccgtattcaataaattcgcatatgaaaaaaaagatgccaacccaacatgaattttagcttcatagtgcatcatacttcgcttactacatatttcatatattgttcctgctgcacgaactgaatctttctttttttctgtgtacacatttccaatagcagaattttctcttatcagatagttatacagtgggcagtctagcactataacactttcgcacttgagcaaatactcaaacacaaaaagattatcttcgccaatctttaattttgagtcaaaccttatatctccaattttttctttattatacagtttatcccagcaaaatgatgttagatatccatcccacagtaataaacttctgatagcctcttgactggaaatttttttctccggatgaattacttcctcctttacatttgtgaagtccttaaaatatgaacactctactaaatccgctccattttttatttgtttatagagcgtccaaagcgcatccggctcaagggaatcatccggatcaaaaaaataaatgtattttccctttgcgtagttcagcccctgattacgcgcattggaaacccccgcattttgtatatggtaaacctcaatccgcccatcgtttgctccataataatcacatatttccccactgttgtctgttgagccatcatcaattataataacttgaagctttctgtatgtttgaattaacaatgaagacaaacttttttccaaataatcttccacattatatactggaacaataacgcttattaaatcatccacaatttatcccctcgttatccttgcaatcacactttataagcgcattttttcttgatattgcaactattattaatataaccacagccgaaaacgctccagattcattgctaaatgtagcttcactcaagcttgcagaaaccatataaaatagaatcaataatattgaaaatttacacctgttattcagcattgcgttattcaacaaatctttgcaaatttgtataatcagtatcacataaacaatcattccaatataaccaaattgaacataaattgatggccagtacacgtccgacattgtagcatatccataattcattagatgagaataattcaacgaattataaatattatatagttgtgactgatttttataagagatattcgttccaaatgtcccaaaacctgttccaaaagggaaatgatcatttgcgatttttaatccaacgctatgtacaccaactcttatgctttgactcgctccccatgataaatattgctgaattttgctttttgaaataaaaaagcatacaattccgattggagcaatataaaccggtttgaaaatatctttaaatgatattcttttctttttagcaaaattcaagaggtaatacgctaagataaatgcaatcgtaataaatccctttgttcggaaagttgccgcaattgaaagcagcgacattatcttaaacactgcatttcttttatcctctgttgctagaatactgtataagagcacttcattataaacaaggtacgtataatgagaataaataaacttataacttctaaggccatatcttacttcatctgctattccagtatttacaagcaaattaactattccaaaaacaaaaataacagttattataatttttgctgtacttattatttttttcgagttcaatcgaatattattttttacaataattcttattccgaccaaatatataataaagaacttaaacgttcctattatatctctcccaattacggaaactgatggcatatatccatacataacatttcccacaattccaataaaaagcactaacagaatgcataatatgctatttttttgttccttattaacagccactttccctttatctttacaaatatatacgatagctatagccataaaaagcaagcatatcagctcatctgtatagttagcatatggaataaatttgtcaaaaaaaatattaaaaaaaataatcaatatatatataaatagtgtcaaccattccatttcatcgtttcctttgcttgttttccccaaatgctactgtactcgtcgaaacaacttctttaacttaaaatatctatcttccccaaaaaaacgaatcagctttctcttccatctctgcttgttacccgcccatgttgctgcgtaatgatgaatcgacactgtttcatcacaaagtaaattctttgtattacccgtcgaaagcggatcaaaaaaacgtggcggatataccgttacttcttttaggtaggtaatatcttcattgctaaccttaccaaatgaacgaatcaccttatcattaagccacggacacgcaaatgtgctttttttctgatctgtaaaagaaatcgaatcatagcattccatcatcttttgtaccactggacttgatttttgggcaccaaaaccaagtccagtgttacatagggattcaggttgctgaatccctatgtaacactgattttctaacagaaaatcaggttttttcagaagttcaacatcagtatctaaatagattccgccgttatcatataccactttcaatcttgcataatccgaaacaaacgcccatgcttttgcttcatacgctgctttcataaacggatggctattcacatcaaaatttgactcatcccatcgtttgatttcgtaatccgggcaatatttttcccatgttttaatacaatctaaaacatctttcggtagtggttttccgccaaaccagcaataatgaatcattttgggtatcattttatttcctctactattttatgttatttaattcttttagctgggacacctgcaacaattgcatgggcttcaatgtcatttactactacagcattcgcaccaataacagcaccagatccaatatgaacaccttttgttatcgttacattggctccacaccaaacgtgatcttcaataattaccggccttgcagtaagttcacctgtcacgccattaccacctatcacatggtcatggtcgatgataacaatattattggcgaacatacaatgatttccaatcgttaccttctctgcacaggttatagagcaattatgattaaaaaacacatcgtcgccaatcgtcagttttccatcatttacagactttagatacaatgggcctcttgacattaaaaaccgtccaattgtaatagatccgttacctataacttcagtcttgaaagctcctctaatcgaattgacccattttacttgaagcttcccatgagcacaaactttggcacagaacatcttccatgcactcactaaaccaatgtaaaacttgtgaagtattttcataatactttcagccttaatccttcatatgttggcatattaatcccctttcataaactatatgtagcttaattgttaatttttttcttaatttttcttttatttcttttttagtaatttacactcataaatattctcaaccaattttgcggattctttaatatcataacgtgcaatttgctttacatgttgcaagcgatattgctttctctgtacttctgtcctttgccccattgataaaattgtatctgcccatatttgtggatcatcctctattgatttccaaataatatccccaaaatccacctctcgtgttactttatccgacacgatacaaggcaatcctgaaatttgtgcttcgagaagcacaacaggtaacccttcaaacctagagggtaaagcaaaaacatccatagcagaatataaatattccggattctcagttgctccccaaaagataatacggtctgcgcatgctgtatgctgtgcctgatttcttatctcctccaaatctggcccatttcccaccaaaagcagtattgctttatcatcttcatatgaaagcttctcaaaggcgcgaattaaataattttgatttttctggttgttaaatttgcctatatgcccaattactaaattatcgcccacctctagtttttttctaattaataatctagtctctgaatttaaagcaaatgcttcggtctcaaaggcattcggtataaccttaaatgctccgttgccatacatccactttcctgcaagttcgccacatgctaaataacaatttgacaccactttcaaaaacggttttagcgtctcatgtaacaacggatgtgagcaagttgtattatggctatgagaaattcgtacaggtacacctgctaacatagcggtaaaaagttctacggcgattaatgtactgctaccatgtacatgaacaatatctggtttctttttttttagaaaagaataaatagtcttataatacatgtatgcatttttctgtttttgtggcagcttacacaattctatgttattctcttgacatgctttttcatagccgatgtcataaggctctccagcggcaatcgctacctgaaatttatttttgtccaagtttgtagcataatttattacttgggatgttactccatttctatcaaagtatgaagttatcattactactttaaattttctcataaacaatctcttttcaaataatttctagctttagtaactccgtagagaaatcaatcggatgttctttcaaatactcaacagtctttttcctttgagaaggattgttatataaatactcaattttatctgccagatcttccgcactcagttcagcaacgtatccattgataccatcttgtatctgctctcttgctgaaggaatgtccgaagacagaattggcaaacataatgcacgtgcctctaccaaagtaattacatacccctcatggcgagatggttgaacatataaatcgcagtgcttcatatatgggtatggattttttttacgaccaagaaacacaaattgattttccagacagtacttctctactaatttctttagctttttttcatctctgccaccaccaatagcataccatgcaaaattgattttcctcttcttcaaaatgcttgctgcttttatagcaatgtcatagcctttctgttctgtcaatcgaccaacagttacaatattaaagctttccttgaacggtattatctcatcttgttcagactttcgcttgatttcttcaatatcaattacattataaaatacggcagccttatctttataatgcggatactctctacaaaatgcatcaacaactgcctgggacacgccataaatcttgtcatattcgcataagtatttttgaacgcttttcatccagtatggtttttcatcatgaagccatgttgcctttttctttgcttgtattttcgtcgccaagaaagctgtcacaaatgaaccatatccatagaagtcaatagcaatgtcataagtcttttcaaaaacgttcgtcacacaattcgaaataaaatcataatatgcaataaatgagttaaccgataattttttcaatacctttgccggaaaagcatacattgaaaccagtgattttgcaaaagaactattaaaagtcaactgaacaatattaacattcttttttagacggtaagcatattcattgtccgaatcaagcaatacaagtgttatattgtaaagttcttcgggaagtgcattaattaattctatcaaagccacttcagatccgccgccacctagtgactttgccattattagtaattctttcatcagttttccccaccaaacaaatcgtctaccagtttttcaagtttctcattaaacttggcattattactactcataccatgtcccatgtcggcaacaatctgatcatagttcgttatgatatctcccagtgtattaatgtcctccactggaataatcgttcccattctctgagccacattccttgcaaactcaacctgatgattatttacatgctcgttgaactggtgctgacgcggcacaacaataggagtcttacctatttgtagtggcatgataaaacttgccggaccaccgtgagtgattacaatacgggcgtcggccacatttttcaccatctgctgatatggaatcaacttactccactgacagtatttcggctcgtatgtactaaatccagtctggataattacatcttcgtttataatgccgtctttctttaattcatctattttctgaatcagccgattaaatggctgctcatgtgttcctaccgtcacaaaaatcattttctcgtcatctacttagaatatacttccaaggttaaccgcctttggataaacctttttctgctcttcccactgcacaacaaacttgtccacaatggggtaaaccatctttcctgtcattgtcggtttatcaattcgatcaaaaacctcgatgtaaaccaactttgcgcccatcattttaccaatataaaaaaacgggaccgcaactgctgcaccgcaggaaataatcaagtctggcttttccttatgtaacacattccatgcaatcttggtattcttaataagagcctttagactccggtttgtcggataataacaaggatacattttttcaccttcgagccggcttcttgcatcctccttatcaaaagtgacccagaaatgatctttgtccttccaaaatggctttaacatatataaatgtgtcaggtgtcctcctgacgaaccaactaaacatactttcatgtcctctgatctccttcatcccaagattttttatgtacacatccgtatggataggatttcccaatgtgatggttttctatattgccccatcactttgcataatacttacaacagtcttaaaaataatcctcaaatcattcttaacactccactccctaatatactgggtatccagcttcaccacttcctcaaagtccgtgatattgcttctgccactcacctgccacaacccggtcagtcccggtctgaatgacattctggctctgtgatgtggttcatacttctcccactcatcgagtgttggtggtcttgtgcccacaaggctcatatctcccactagtatattgaagaaatgaagctcttgagcgctagtcttgctacataaagcataaaatctatatgctttgcccatcctctgcctttctttctgtacattctttccaaattctccttgtggtatcttttatttccctctatacctactacgggggaggtacctttgtcctccctcgaattattttagcctgttttgttttattcggttatttgtatctttttctgtatctaatcagggtttttcagtaatttattttcactcatttttaattctatgtcaatgaatattaggttttctttataatttttgacacattcgctaatcactatggtattacagcaccaatattatacattattatatatcatactgcttattttccctcaaacagcctctgcttcctctctatcatctcatcaatccttgcgatatactgccctacatccttgacattctcgcatctgtcaattcggtgagtgccatcgggattcggtaccggccagacgcgcttggtgcttgctccggctccgcacgccacaatcgtttgcttttcctccattatcaatatgttgtatacgccggccttgccctttgccgcatagcccacgttctccatattgccagccatgcccttctgcctgtagaggtagtatggctcaagccccatctgcttacagtaggctgcgcagagatccatatgctcctgggtgttgaccatctgcatatctctgtagcggtccttgaagatggtgagtcttgcagctcgctttactgcgagtgagtggatagtgacgttgtcaggcgccagctccttcaccagctccattgtgtgccttacatcatcgagtgtctcctcaggaagtcccatgatgagatccatgtttatgttgttaaagcccagctcacgcgcgagcttgaagctttgtatcgtatcgtctactgtgtggtgtcttcctattatatcaagtgtctgctgcttcatggtctgtggatttactgatatacggctgatgccgtttttctttagtgccataagcttttctctcgtgatggaatccggtctgcctgcctccacggtaaattccaggcagtcctttaaatcaaagctgcatttgatttttctgataagcctgtcaagctgggcagggcttagtgtggtcggtgtgccgcctcctatgtagatggagtttagctttttgtggtagaatttctgcgccgtgtagtctatctccttctcgagtgcgtcgaggtaatcgtccacgcggtttttccacacacccagcgggtatgaggtaaacgagcagtatgcacaggtgctcgggcagaagggtatgcctatgtacaggctatagccgttgtcatagtccaccctatcgagcagtgccttctcgcgctttgctatgcctattgagaggtcgattttctcatcgcttgcgaggtaggttttcttcagatagtcgtatgtttccttatcgctcatgccgtcctctatgcacttcatggctatcttggtcggtctgatgcctgagagtgtgccccacggaaggctctttcctgtgccattttctatcatggaatacagggcgagcttgaggcggtttttggtttctttgcggtctgcactgtctacggatatttttgtgcagattctttttccggctctattcagcgtccactccactgcaatttcatcgcccacatagtctatcttaaatacctgtgaggcatccgcaaattcctttacgccatcatctgtcatctcgtggtgtgtgcaggccaggtttttcccctccacctcatcaggtgagcaactatagtacatctgcacatcctcctgcgggaagaactccttgagcagtgagtgcacatcatattcaaaatccggtttattaaatactactactatcataagtaagggttatacatcctctcgttttctatggttgttgtgtcgttgtggcccgggtacacctctgtatgctcaggcagtgtcatgattttttccttcactgtgcgcacgaggtctgacatgctgccgcccttgaaatccgtacgtccgattgagccgcaaaacagcgagtctcctgtaaagatcacgtcctcatacgggaaataatagcagcagccacccggtgtatgccccggtgtgtgaagcactactatgtgaaagcctgcgatgtcaatttcctgcttatccttcaaaaatacatccgcataaaaggtctttgactggcccatcatgtagctgacattaagctgcgggtcatcgagtgtggctttgtctgcctcatggatatatattttgatgccgtagcggtctgcgagcggctttgcatccgtggcatggtcaaagtgtccgtgtgtgagcagtattgctactggctttgcgcctgactcatccacctttttggcgagctgatccgcacacgcgcccgggtctattattatcatttcctttgtctttatattggtgacaaagtagcagttggtctgcaccggtcccactacgaagtggtctatcttcatatttaccatatgagtgtactccttgtctgttatatgttatgcttcacgcaagaaccaccgggatttagccggtggtcctctctacgtctattacactttctatctgtctgagcttctccactagaacctttatctggtccctgcctctgatattgaaaaatacctcgattgtagcgatgccctgcttgctggtcttggactggataccactgatattgatttccttctcggtaaatatctttgtgatatctacgagcagtcccggcctgtcatgacagaatatctttaggtctgcctgatactcggcaccgttgtccatgagggctgtatcctgccactctgcttctatgagcctgtccttttctatctttgacagattgatgatattcacgcagtctgtcctgtggatggagatgcctcggcctcttgtgacaaagcccactatttcatctcccggaacaggattgcagcacttcgagaagtgcacagccacgtcatagagtccgtgtaccacaataccgctctttgacttgtgttcgggctgtgtgcctgccgccgcctgctgcttttctgcaatgctgccaagcacctctgcatctgtcacaggcaccacatgatccttcttgtactcgtcgtacatcctgttgactatctggctctccttgagtccgccgtggccgacggttgcaaggcatgaattccagtcgtggaagccgtatttgcggcgtattttttcctgatactcaggcttgtttatttcagcaaagttgataccctttgccttggcataggctgctatcagatccttgccgtgctgtatattctcctccttgagctcacttctgaaccactggttgatcttgttcttggcctgtgtgctctttacgaccttgagccagtcacggcttggtcccttggagttctgtgaggtgattatctctatctggtcaccgtttttgatgacatagtctatcggcactagcttgccgtttaccttggcaccgaccatcttgttgccgaccgcagagtgtatgctgtaggcaaaatctataggtgtggagccctttggcaggttctttacatcgccggacggtgtgaatgcaaatacattgtcggagaataaattcaaatcgctctttaataaagtcataaactccttattatccgacatatcctgctgccactcgagtatctggcgcagccagctgagcttctcctcctctgtgacagtggtggtagtggcattgccgttgtttgcttccttatacttccagtgtgctgcgataccgtactcagctgtacgatgcatctcataggtacgtatctgtatctcaaacggctgtccgctcgggcctatgagtgtcgtgtgaagcgactggtacatgttctgcttcggcatggcaatatagtccttgaaacgtcccggtataggcttatacttctcatgtatgataccaagcactgcgtagcagtccggtatggtatccaccagaatcctgatggcaaagaggtcatatatctggtctatagtcttgtcctgattgaccatcttcttatatatactgaagaaatgctttgccctgccgtatatctctgccttgataccggcatccgaaacatacttcttgacatcgtttaccagaccctggatgtaggtgtcgcgctctgtctttctgagggctaccttctctaccagatcgtagtaggcatccggatagaggtacttcatacaaaggtcctcgagttctatctttatcttgctgataccaagtcgctgtgcgataggacagtagatatcctgtgtctctctggcgatacgctgctgcgcctccttggactggtacttgagtgtacgcatattgtgcagtctgtctgccagctttatgaggatgaccctgatatcctttgccatggcgagaaacatcttacgcagattctcagcctgcatctcaagcctgtccgcattcttgtccttcggatccttggtgctgtctgtcagatgcaggtgctttaacttcgtgacaccatccaccagatgtgcgacatcgtctccaaactccgcacgcatctcatccatggtcatgatggtgtcctccagcacatcatggagcagtcctgctgcaattgtttccttatccagctcgagctcggcgagtactatggcaacacacagcggatgtatgatataaggctctcctgacttacgtgcctgacccttatgggcatcataagctaccctgtaggctttgtccacaaggctcgtgtcatccgacggatgatactttttgatttcctttttcagctcatcataaagctcctctgggctcgtaaaatcctttgttccccttataccgctggtatctgagcgaaatttgtccgctattttttctaattcttctgttgagtaatctgccaatagtctcacctcgattgtagtgtatctttagtagccattatattttatttctttaaaaattgcaatcttatgttgttagccgataaccatctttactccgccatacatgcctgctgagttgccgagtgtggcaagcttgatctctgtctcgcggcttgcatggaaagcatactctttatagtactttgctgctgtatcgatgatgatgctgcctgcctttgagaggcctccgcctacaacaaatacctcagggtccataacgcatgctactgctgccattgccttgccgagaagcttcatagactgctctactgccgcaatgcccgctgcatctcctgcctttgccgcatcgcatacatccttggctgtgaagcctgcatttaaatcaagttttgttgccacatccctgtgtgctgcaatgtatctctctgccactcttacgagaccgtttgctgatgcatactgctctaagcagcccttcttgccgcagccacagcactctgactcatcatctaccataggcatatgtcctatctctccgcctgctccgtttactccggctacgattctgccctcgcggatgattcctccgcctacgcctgtgccgagtgtgatcatgactacatcctgatgaccctttccgccaccctgccacatctcaccgagtgcagctacgttggcatcgtttccggcctttaccttgatgccgccgcacagtactgagagtgactgtgccacgttgaacacgccccagccgaggttgacacatcttaatactgttccgtcatcctttacaggtcccggcactcccatgcctataccctcgatgtcacccatctcgatgccatgcttctcgttattctccttgatagatgctgcgatatcaggcaggatgagctcgccggaattctctgtgcgtgtaggaatctcccatgtatcgacaagctttcctgttgtctcgaaaaagcccatctttacagttgttccacctatatctactccgtatgcgtattgtttcattttttcgtcctccaaatcgttaaactatgtttatattttattgcctaattgcatatttttcaatgtttttcattgttttttatgttttttctatatatagaagcgtttatatcatcatccatatgcccgctatatgtaaatccaagctttttggcaaggcgcaccgatgccgtatttttctcgtctatccggcagtaaagctcttcaaagtctgtgttttcgcgcgcgtagtctatgatgaagcggcatacctccgtggcatagccttggttccataattccggcgctatcatatagcccagttcatcatgctcaagccctgccctgcctatcagcttccctgtttccttggaaaatacaagccacataccatactcgtaaaagccatacatgttctctatatatgccttctggtattcaagctctgtctcgtagtcgtaaagcggttgcacaaagtctgtcatgccgggcttgtcatagagctcatagagcgcaggaaggtctgacagggacagctcacgtatcagacacctgtctgtctcaccgatgtcccacgggatgtgattataccgcctgcgcacccgctccagatactcaatatcaatctccgcaaggctctcgactgcatagtgtgtgccgcactgcggttctcctactgatgctattccgagtgagtcggctatttgcttctgctgcctgtttgatactatccagatgcagtcggcgggagcagatgtcatctctactgcacgcttccactgtggctttaatatctcgtcatgatagtaaaaagaggcaagttttgcgcttgcctcatcaataattattatcattaaactgtctccggctccggatagtccactccgaatgcctcaactgtaactgtcttcatgacctgagcctcaagtggtttgtccatgtagtctgtgcgcacctctgcgatcttgtttaccacatccatgccctcgattaccttaccgaatgccgcatactcaccatcgagatgtggtgcatcctgatgcatgatgaagaactggctgcctgctgaatcaggtatcatggtacgtgccattgaaagtacaccggctgtgtgctttaagtcatttttgaaaccgttgtgtgtgaactcacccttgatttcatagcctggaccgcctgtaccgtttccgtccggatctccgccctggagcatgaagcccttgattacgcggtggaagcatactccgtcatagaagttgtgattgattaagctgataaagttgtttactgtgtttggtgcgatttccggataaagctccgccttgattacatcgccgttttccattgtgattgttacgattggattctgtgccattatttttctctctttcttttataatattatgaggcttggagaatatccattcctcgcaataattaaatatcgaattaatttctacccgattgattttacctaattttactcactcagagcctcgaccaccttcggaaactccatgaagtgtgatgccttcaccagtatggtgtcgccctccttcacatatgaaagaagctcctgtgtcatggtctccctatcctcgaaatagtggatgtccacatcggacgatttctctgcggctccggctgcatattcctttgcaagctctcctgcggcaaaaagtgtatggatatgattctctccaactgcttcgcctacctcatggtgcagctttttctcatcgcttccaagctcgcccatgtcgccaagcactgctattgtcctgccctttgcatgcgaaagcacctcgatagaggatctcatggatacaggatttgcattgtagcagtcatctatcactgtcatgccgtgtgttttgatgaaattggtacgccctgcgattgtctctgctttctcgattcctgactttatctcagctattgtgaggccaagctgcaatccgacagctgctgccgccatggcattgtatacattgtgctcacccgggatgtggatgtgtgcatcaaactcaccctccggagtgacaaaatgagccttcatgccgtcaaagcccaggttttcaatatttgtggtatatactgatttatgaacgcctgatgatgattccttaccatagtatatggcaggctttccatttaccgtctgcactgtggccagcttatcgtcatctgcattcagcactgcgaccgcatccggcatcatatgctcaaagcactctgtctttgctttaagcacaccatccctgtcgcccaaaaactccagatggcagtagccgatattggtgatgaccatgacatccgggcaagacatagtagaaagtctgtgcatctcgccaaaatcagatatgcccatctcgagcaccgctacctgatggctttccctgattccgaaaatggtgagtggcaagcctatctcgttgttaaaattgcctgcggtcttgtggacgctgtatttctgctcaagaactgacgatatcatctccttggtgctggtcttgccgacacttccggtgatgcccaccaccttgatatcaaggctttttctgtaaaatgccgcgagctttttcatggcatcggtggttgattcaacaagcacatatgggcctgccggatccgtcagctcatgctcagagagcacaattgccgccccctgctcaaacacagtcggaatgaatttgtgtccgtccaccctttctccctttatcgggataaaaagatagccctccttcacctgtctgctgtctatgactgcgccggtgattgtcgtatcgagctgtgtctcatcgcctatgtatgtgccatcgcaagcctttgcgatatttgcaaatgtaagattcttcatgtacttatccgacatgctacacctcatattttttcaaagatatgtcaatcagatgctcacagagctgattaaagctcataccgataaccgcggcctcctgtggcaaaagactggtcggagtcatgcccggcagtgtgtttgcctcgaggcagaacatctcatttttgtcattgagcaaaaagtctgagcgtgaatatgtgtcaagcccgataacgcgcgcaacctcctcggcatagtgctgcatatcctttgtcacctgctcaggaagctcggccggacatgtctctactgtactgcccgccttgtatttgttcttataatcgtagaagccctccttcggtgcaatctctataataggaagagccttgccctcgataacgccgacagagaactccctgccctgtacaaactcctcgataaccagctcattttcccacttgaaggcatcgtcaagtgccgccttaaactctgccgcatccctaacgatagtgacaccgatgcttgaaccaccgcagcatggctttaccacacatggaagtgtcaggtcaagctttgtgatatcgtcctgtctggtcgctcttgtcatggaaataccctttggagtagggataccatttgcaaggaagaactgctttgatgtctccttgttcatggcgatggctgagcttaaataatcgctgcctgtatatttgacaccgaagaggtcaaatgctgcctgtatctttccgttctctccgttttctccgtggagagccatgaaaacaatgtccgccatctgacacattttgatgacatttggtccgaagaagcaaggtgactggtcctttctggaagcctttacctttgcgaggtcaggtgcctctgtcggaatatcactgacctgcacgcttatctcgtctgcgcggtcaaatatacctgtcaggtcctcctccctgtcactatatcccataaatacatccaataatataactttgtggccgttctctttgagtgccttagctaccatgcttcctgtcttgaaggaaacatctctctctgtgctgagccctccggcaagtactacgatgttcatttttgtcctcttttctttgattgaattatcatgctttggcttaattaaacacaatgcaatgcttcttttttaaagctatgagtaatcaacataatttttccaaaattataacaccatttgtgcaaaaaagaaagaccggttgcccggtcaaaaaagaaattctcatcttattttaaactgtgttaacttccagcagctgtatcattctcataaataccatccgcccgtgcaaatcatcctgtgaaagtgattctccgtacttcaatactaataatcggcactgataaaaattcagctccggattgccaaaaagcaaaatccgcaaggctgcattttccaggtaattgtgtatatttcccacctcaataaatatatctacgatatcatcgaggttaataagtcctttctgttcatagtacattgttctcaaatatttgtttccctccatcaactatatttttcatagaacttctttttcttttgaaattttttcgttttttacgaaatttttctctttgtttttgttgatgggttaatttttccatataatatatcaatattctaggcgcgttacgtgctggtattttgaagatttctattagaattttaatattgataggtgattagcagttttcgacaaaatacgacatggtttttggtttaatttagttggtttttgatttatattgcgcttttctcataagaatttttggaatgataaatttgtactatatttttaggtttttattctaattatttcatttttttaaaatttatataaatggttaatataaaaaaccggcagccaacggctgccgattttcgatgaaagaaaggttaaattatgatgaaaaataagagtctaacattccggttcgataagtccgtatgtatttccttttctcttgtagactacatttacttcgtcattctctgcatttctgaatacgaaaaaatcgtgtcctgagagctccatctggatgcatgcatcctcaggatacataggcttcataccaaatctcttggtacggacaatcttgatttcctcgtcctctgcatcgtctgcctccacgaaatcatcctggaatatcgccggtgcatacttctttgcggaaatcttggttctgtatttgcgaagctgtctctcgattacttcctctactaggtcaattgatacgtacatatcactgctgacctgctctgaacggataacatgtccctttgccgggatagtaacctcaattttctgtctatccttttctacgctgagtgtaacgtatacgtctgtgtccggtttaaaaaacttctcaagctttgacagcttctcctctactgcctgcttaagcccctctgttaattcgatgttttttcctgaaattgttattctcatgatgtccaacccctttaccgtttatttgatacgttgtctgtatcatgtaaatattataccataaatttcgttttcatcaatcatttttatgcaatttatataaataatcaagggtttatttacggtttttcgcgaaatcgcttgatttcgctatgattagggatttcatcagaataaaaaacatcaagtcgagtgattttttatacactatcgcaacatttctcaactacaacagcacatctaagctatcacaacgtttctaagctaccacagcgcatctaacctatcccagtgcctcaagctgagaggaaagctcctcccacgcctccatatcaataaggatttcttcctcgagagcgtctatctcgttttggatttccgtgagctttgagtagcttgactgatactccggcttcatgagctcagccttgagctcatcgagctttgcttccttgaccgccaggtcctcctcggcctttttgacctttttttgtatctttgagcgctccttgcccgggttgtagtatgccttgccggttgatgagactgccattccgcctgcctgggctgcgctatttgcattggtgctttcgcccacattacctgctgcagcattttgtgacgtgctccggtttgcatcactgcctgtctgactgctgccgttctggcttatcgcgccgccaaatattgcattgcctctgtatacatttttgctttcctcagcctcacgatcgagcttttcctgatactgctcatagccaaactgatagagattggtcgtgccatcctcgaacacaagcagctgtgtggctacctttttcacaaaatatctgtcgtgtgatacaaaaatcagtgtgcccttgtagtccttaagcatgctctctagcgtttccttgcctacgatatccatatggttagttggctcatcgagcacgagcacgttcggtctggtctttaaaatcttacaaagcgccagtctgaccttttctcctccggagagcatatttacgttcttgaacacgtcctcccctgaaaaaaggaaggctccgagtgcatttctggcctctgtttctgtaagattcggatactcatcccagaaatcatcgagcacagtcttgttgcttgtatacatggccatctgctggtcaaaatatcctatctgcacgttggttccaaagcggtactcgcctgaaagtgcagggatcttacccacgatagtctttaaaaatgtcgattttccaagtccgtttccgccgagtatgccaagcttttcgcctcttttcaaatcaagcgacactacagagagcggatggtcatagccgattgcaagctctgatgtataaagcacatcgtttccggtctccttttcgggctggaaattggcatggaaggtcttgttgtcgtacttgtccggcgcctcgataatcaccatgcggtcgatagccttctgctttgactgcgccatggctgtcttggtcggcttgcccttgaagcgcgtaaccatacgctgcaaacgctctatctccttctgctgggcgatgtgatccttcatctgcttgtcgtagttttcctttttgcgggcgataaaattggtataattgcccggatagcgccttgccgtgccgtactctatctcgtataccacatctaccacattgtcgagaaacatacggtcatgggatacgacaaccactgccttcgggtacgacttcagatagccctcaagccactcaatcgtcgtgacatcgaggtggttggtcggctcgtccaaaagcagtatgtcaggctttgacaaaagcagctttatgaatgctatcttggtctgctgacctccggaaaagtcacggattggctttttgcgctcatcatccgagaagccgaacttgcggatcatgacctcatattccttctcataatagtagccgccatcatccttgaaggcctcctccatcgcggtatatctggctaccttttcatcggaataatcatgctcgagctctgccgccgcgcgcgcaagctctgcctttcgctcgtccattttcacgaagcatttgcgcacctcctgctcgagtgtcacatcaggatcatcaaacgcaatctgcttcagataccctatctccgggtttcctgcctttgcaataaatgcgctctcatcgctgtcgagcttttccatctcaacctcgcctgaaatgagctttaaaagtgttgtcttgccacagccgtttctgccgactatcgctatcttttctgtgtttctgatttcaaaatctatactatgcaaaatgacgtcgtcgccaaatgcgacagcgccattacttatctggtagagcatatactatcctttcatgcttatgcctgctgcttaattgttagccataatgtagttgacaaactgtgttgcagtacgtcccgaaatgccaccatggctgagctcccacttgtttgcctccctgcacagctcctcgtctgaaagtgtgcagccgctctttctcgcaagctctgttacgatgttgaagaactccttctgcgatggctttgagtagctgattgtcacaccaaaacggtttacaagtgacagcttctcctcaactgtatctgagtggtgcttgtcattgctgttgtcctggtcattacggtcattccatgtctcctttatcaggtgacggcggttagaggttgcataaatcagtatgttgtcaggctttgtctccacaccgccctcgataactgcctttaggaacttgtactcaatctcatgctcctcgaatgagaggtcatccatatatatgataaatctgtagtttctgtttttgattgctgcgataatctttgacagatatttaaactgatgcttgtatatctcaatcatgcgcagtccgtcatcataatactgattgacaatagccttgatacttgttgattttccggttccgctgtctccgaaaagtagcacattgttggcctttttgccctgcacaaacgcttctgtattgtctgtgagctttttcttctggatttcataaccgatcaggtcatcgagcatgaccgcatccatattgttgattggcatgaaggagaatccaccgtccagatgctcctcaatcctgaatgccttgttgagaccaaacatgccgactccgtatgccttgtaaaagcctgttaccacatcaaagaactcctgctcatccttagctgcctcaagcttcttgctcagcgcccttactttctcgctgacattgtgattgtacataaggtcctttttcacaatggccttataattgctgatctgtgtgaagcagtctattccgagtgctgactcgattggcttgaaatcatagtcgaaaagcttcttaaaaattctgaaatcgtttgccacaagcccatttacgctgccatcgctggctccgaccttctcacaggtgatggaaaacggattctcactcatcataaggaagaaagtgagatagttgtgccacagattgtcatcaaaaccatagtctgtcgctacctttaagattctcttgacctgtgtattgatgtcgcgcacaagctctgtcttgttgtactcgcccacctcaaactgctcaaagagctggcccaatttataaagtatctcatcctgagataaatctccgtacataagtaattttgatatttcctgatacatggctgttcctcctggtttgccttgttttcgctgctaacatatgattataaacactgaataacaattttgcaagggcttatgtccctctctgcatgcaaaaaggcggagctaaaactccacctttattgttgtgccacgccccacctcgctgtcgagcgtaagccctgcatcatgcagctccactatatgctttactatcgcaagcccaaggcctgtgccgccggtctccttcgagcggctcttgtccactctgtagaagcgctcaaagacgcgctcctgctggtcctttgggatgcctatgccgttgtcctcgaccgtgagaactgtcttgccacctagcttgtgtaccgtcacatttacggtgccgccctcattgttgtagcggatagcattctggcagagattctcaacgagctccgtgagaagctgcctgttgcctcgtaccatacagtcagtgccgtcaaaattgagtgctacttttctctgctcggcattcacctgaagattttccatgcagtccttgaccagaccgtacagatcaagctgttcaaagccctgctgcgcctcactggaatcaagctccgagagctttatgatatcattgatcaaggaaagcaggcgctgtgcatttcttctgatttcagtggcaaaatgaatctgctgctctttttcgaccatgccgttttctatgagctctgcgtagccggagatggctgtgagcggagtctttagctcgtgtgacacattggctgtgaagtcctgtctgctctttgccgcggcaagcacgccctcatgctgtatccttatcgcattcatgaacggcacgagctccttgtactctgtctttttctggatgacagaggcctgctcaaggttgcctgcgagtgtctcgattggcttcatgagctttctggtcagactcttggcgagaaccacacatattccaactatgataaccgtcactataagcatggcaggtatactgcttgcaaacatgttccagatacttcttgctgcaatagaaacacgcagtacagttccatcattgagctttatggcatgatagaaggtattgctgttcatggttgctgatgttctcacgctgtctcccgtacctttatcaaatgctgattcaacttccggtctatcgccatgattttcaagttttttcacatcattttgattgtcatacagcactgtgccatccttgtcaatccaggtgacacgaataccctccacgtcaatctgcgggatttcatttatatcctgttttagtattccggtgctttctattgtctctgccatgacctgcaggtcttcctttacctgcttctgaaagaggtaatagttgattactgtcatggaaaccatagtggcaattgctacaaaaagtgctgttgctaccagataatagttaatcttctttttcatgctgtacgctccgcttatgtatattagaaatcattataacagctattattctataacatagcccacatttctgactgtctttatcctgctgccatagtcacccagcttgtggcggagtgtctttatgtgcatgtccactgtacgtgtctcgccctcaaagtcagtatcccagacgcttctcatgatgacctccctggtcatgactatgccctgactgcccataagaagccttaaaagctcgtactccttgtatgtaaggtcaaccggctcattgttcactgtaaccacatggcgctcatggtcgatcaccagatcatccagctttaaaagcttcggctcctccttcgccgttctcctgagcagtgcctttactcttgtgataagctccatgattgagaaaggctttttgatgtaatcatctgcgcctccgtcaagcccttttatcatatccatctctgtggtcttggctgtgaccattataataggaatatcctgtgtggccggacgttttctgagctttctcacgatatcgtagccactctcatccggaagcatcacatcaagcagtatgaggtccggtacgagttcatccagcttcttgtaaaattcctttgcgttttcaaatgcactgacgatgtaattactgttttttaaagcaatagtctctatctcacgtatgctctcatcgtcctctacaatataaataagtgccatagctttctccatttcaaaaaatcttatgtaaaatttttacctgctttttactttcgattatacattactaatgtaaaacagacgatggttttatgtaaaatttatgtaaaatccatcgtctgtataaatttcatgattaaagggtaaaaaggtatcatcgatgcatgcttgcatgcaattcgatgtatacctttcatttgtgtatgataattaaatcatgatttgcgaaccttgtcatcaagcgcaaactcaacccactcagcaatatttgtcgcatggtctccgatacgctcgaagtattttgcaaccatgagaagatcctctgcctgctcaccatcctccggatgctccctgatgaaatcaataagctcagcctttaccttatcaaaaagctcatcaaccacatcatcctgcttcatcactacgtgagccttgtcattgttcttctcgacatatgcctcgattgccctgataagcataagcattgtctctgaagccatgcttttgacatgctctatattgaccctgtatggcttgtcactgctcatcaaaatggtcatctcgctgatatcggctgcgtggtctcctatacgctccatatcagtaaccatcttcatcgctgcagaaattgttctaaggtctcttgctacaggctgctgctgcatgagcagattaaagcacaggctctctatctttttctgctctctgtctatatctgaatcgccctccatgatggctttggcgctatcggcatcctgatgtataaatgcctcgatcgctttctggattgactcctcaatcatgcttcccatgtgcatcatttcttcattcagcttcttaagctgctcatcgaatttcgatctcattaaccaaacctccctgtgatgtaatcctctgttctcttgtcctgtggatatgagaaaattgtctttgtgtcaccaaactcaaccatatctcccacaaggaagaaggctgtatcgtctgacacacgcactgcctgctgcatgttatgtgttacaactacaactgtgtactttttctttaaatcctccatgagctcctctatctttgaagtagagatagggtcgagcgctgatgttggctcatccatcaaaagcacctccggctgtacggcaagcgctctcgcaatacacagtctctgctgctgtccacccgaaagtcccatagcagatttctttaatctatctttaacttcattgaatatcgcagcaccctgaagactttcctcaactatctggtcgagtatctttttatccttgatgccatgcactctcgggccatatgcgatattgtcatatatgctcatcgggaacggattcggctgctggaaaaccatgccgacctttttgcgaagtacggttgtatcgactgatggtgcatatatattctcaccatctatctctatgcttccctcgattctgacgttgtcaaccagatcattcattctgttgatacactttaaaaatgtagacttaccacatcctgacggtccgataagcgctgtcacgctgttttcttttatgtccatattgacaccatgcagtgcatgattctggccataatacagattcaggtcgcgaacctgaatttttatttttttctccatttgtatctcctgcaacatgtaataaatttcttgtcttcgagaatacattatatggatgctttgtaaaatgctctatcagatgtatgtaaaatctatgtcaaatttttacacacataaattattcgcactgtttgtatttattatttgtatacactatttatatgctttatagtcggctttattaaagtactgtctgattaaagtattgtatctttaataattaaaagctcatccattatcctgtctgcatcaatatttgagtaattgataataaactgatgcctgtcctcctttggcttgctcaggttgaaatgggtaatcgcctgaagctttataccttttttcaatagcagctcttcaactgttttgtccggaaggttcgtgtcaaactgtatgataaaatgcagtccggagtcattttctattaccctgcattccttttcagtgaagcagccttttatggacgaaagcacgctctggcgctttctgccgtagtgcagtctcatcctgtttatgtgcttttcaaaatagccctcgctgataaaacgtgccagcgtgtactgctcaaaggtggataccgtacatgagtaaaatgaaagcctcctgtaaaactcatttgccagatgctccggcagcaccatgtagctgattcggatggtggatgtgagagattttgaaaatgtatttatatagatgaccttttcacacgcatcaatcgagaggatgggcggtatcgggtgtccgttcatgcgaaactcactgtcgtaatcatcctctatgatgtatctgtcactgctctcgttggcccatgccaaaagctcatagcggcggttcacaggcatcgtgattcctgtcgggaaatggtgtgtcgggctgatatgtgctatctgcgcgttcgctttctttataagctccacgctgatgccctgctcatccatctgcaccggcagacattttgcattgttgcactcgtatatctggctgattttcttatagcccggatcctccacgcaatataccttgtccgtacccaaaagcttcacaagcagtccgtacagatactctgttcccgctccgactattatctggtccgggtccacattcataccgcgaaacgatgacagatggcttgctatcgcttccctaagctctctcactccgccacacggcgacaccgacaaaagctcctgttccctaagggaaatcgtctctcgcatgagctttgcccatatggaaaacggaaagttgcctgaatctgtcctgtttgatgagaagtcaaatatgctttcatcctgctcaggtggcagctttatgctaagctccttctgcaccggtgccttgattaccctgatatctgacacatcggctatgaaatagcccttcttgggccttgcaaacatatagccctcgcctatcaactggtcatatgcattttcaaccgtaatggtactaacccccagattcttggcgagggtacgctttgatggcattttctctccggagcttaattttccctgtgatatatcgtttttgatgcactcatacaggcatttgtagagtggcccgtctgtttttgtgaggtcgtaggtcagcatttgattcaccgctttctggcatttttattttccttattttgaatattttaatattaccagatgtggcgtaatattgcaaccatgatatgtggctggtgggagcaaatacatcccggcggcgcaggcggcgagtaaacatatttgctcacgcctgactactttcgtcatataaattgacataaaagcaatataaaaataaaaggagatttaacaaatggaaaacaataagaatactcaatacgaactcaacaaagggcttgcgcagatgctaaagggcggtgtcatcatggatgttacgactccggagcaggccaggattgcagaggctgccggtgcatgtgccgtcatggcgcttgagagaatccctgctgatatcagagccgcaggcggtgtttctagaatgagcgatcctaagatgattaagggcattcaggaggctgtcagcatccccgtcatggcaaagtgccgtatcggtcacttcgtggaggctcagatacttgaggctatcgagattgactacattgacgagtctgaggtgctttcacctgctgatgatgtgtaccatatcaataagagagatttcaaggtgcctttcgtatgtggtgcaagagatctcggtgaggctctccgccgtatcaacgagggagcttccatgatccgtacaaaaggtgagcccggtacaggtgatatcgtgcaggctgtcagacatatgagaaagatgaattctgagattgctaagcttacttccatgcgtgaagatgagcttttcgaggcagctaaaaatcttcaagtgcctttcgagctggttaagtttgttcacgataacggcaagcttcctgttgtaaactttgcggccggtggtgtggctactccggctgatgcggctcttatgatgcagctcggtgctgagggtgtgttcgtcggttcaggtatcttcaagtcaggcgatcctgccaagagagctgccgctatcgtaaaggctgtgacaaactttactgatgcaaagctcatcgcagagctttctgaggatctcggtgaggctatggtcggaatcaacgagagcgagattaaaatcatcatggaagaaagaggcaaataaaatgaaatcaggacttaagattggtgttttagctgttcagggagcgtttattgagcacaagcgcatgcttgagtctcttgggtgcgaatgtgtagagctgcgccaaaaatcagatatctgtgacttagacggactcgtgctgcctggaggcgagagcactgtgcaaggcaagctgctccgtgagcttgatatgtttgatgagcttaaggaaagaatcgcaaacggacttccggtgcttgcaacctgcgccggtcttatccttttagcttcacatatcagcaacgatgacaacgtatatttcggcactttgcctgtcactgttaaaagaaatgcctacggcagacagctcggaagcttcgaggccacagcaaggtttgacaatagctttgactttaccatgacatttatcagggctccttacgtggaagctattgacgactccgccaaaaatgatgtacatgtgctcgccgagtatgacggcaaaattgtcggtgtgcagtataagaaccagattgggctggcttttcatccggagcttgatgatgatacacggattcatgagaggtttttggagatgatatgattattcaggaatgttattataatttgtaatagcattccttcttgttttctatttatatttttattgccatatcatttttcatcatttataattatatatcatgtgtttcaacactattatccggaggggttatgaaaattttaattagtagggaacaattggagcttttacttgaaaaaaagcgcgactttataggcaaaaagataacaatagatacgattatagcaggtatatctttcttaatatcagtatggacagcaaactatgaaaccatatggatcatcccgggaattgtatttaaaactatattttgtgttatcggaattgtttacatgataaaaataatatatgatattattgatttcaaaaacaataattacactcacacagacttattgagagatatagaaggattggacatgatacagcataatcattcattaattataatcaaaaacagtgccaccggcataaaaacaaaatatcttacatattatgatgaaagatgggactgtaagctgtttcccaatttaaaaaccgcagataaagacaatgaatcctttatcatcagtaatttatcaaatgacttaggtatacccaaaaaagaaatcaaatgcaaatatatatcatccagagtacaggaaaaatattccgtaagccataacgaaaacagagtgtataaccataggctgtacgaagtagaatttaaaaatattccaaaaataatgaataaaaacgacttttctattaactcccgacactattattggatgacaattagtgaaatggaaaaagacgataatataatgaaaaagaatatggaagtagttgattttgtaaaagaatgcgaaaaataattttttaagccggggcatctgccccggcttttattgtttcttatgtcttataagttcaatatataatatgattagacggtcaataggtatcataatattgttttaaaaagtctaaaactccaaagtcaccttaaaaagatcaccgtccacagtcagctccaaagtaccattcatgagcttcatgagactttctgcaatagacagtccaagtccgctgccctcggtatttcgtgagctgtctcctctgacaaaacgctccttaagctcatcgcttgaaatattaagcggtgtagctgacacattcttgaatgttatgatggctcctctgtcctttggaatgatatcaatatacactctcgtacccggctgggcgtatttgttgatattgttcatcaggttatcaaacactctccacagatgtcgtccatctgcctgaatcatgacaggcgtaacgtcatttttaataattaaatcaagattatttttcttgaatttttcttcatattccccggctacctgtgacagcataacagctgcatccagttcctccagctctacgtttatgctgcccgtagatgcctttgacgcctcaagtaaatcctgaattaatttttttagacgtgatgactgtctgtcgagaacgtcaagatattcgcgtaccttctcgttatctatgtcctccttctgcaacaggtccacataattgataatggaagtgagcggtgtcttgatatcatgcgacacatttgtgatgagctccgtcctgaagcgctcgctcttcattttttcagagaccgccgcctctattccattgctcacattgttcaaatcctcaccatgctttctgaaaaacagcataagccttgatgtatcaaccggctgtgaaaaatcaccgtttgctatagcctttgcggcgcatcttatcctgtcatactgcatgatgaatgcgataagcagagcaagctctataagctttataatgaatataaatccaatactccctattccaaagcctataagctcaagcaggcatatgaaaccgaatgccagcatactgatcaaaaacagcggtacatttctttctatccatgaaaagccgtatctgattggagcaaataccatcctgcatagctttttgacaggctttaagaaaaatctaacaacatagtagcacagtgtatgcttccagaactcatgtgccctgattcttacgtatgttgtcaggattgcttcaagcgaaaccatggttgccgccagacaaatgagtgccaccaccggaagctgctttataagtaaaaagcctgccggaaataccataaagtctgcaaacattgtcactccaagcatcaccgcatacggcagcctgtcatataatcgtaatttaatttcttccgaatcctcacgttttccggcaactgtcagcagataccccgctgtaatcacaaaaccaagtataaatatgacaaacaatacactcaaatgagcctctgtaaattccatgacgtcaagtaagctgtctgcctgattgaagtaatcgcccttttcctgaagctgctgcggaagctttgcatacacataatagtactcaggcttatcttccgtttgggtgtatggatagtacacaattccggtatccgatatattaaatgtatccggtaaaagctcatagctctcattcacctgctccaccacttttatgatttcgtagctgtcataataaatatcctcatcataatcgtagtaagagccgtcactatcaaagcgcgaatcgccgtcatcactcagattcatgccacactttatatgatttcctttttcatcatagcactttacatttttccactcggcaaagcctgtaatatcgagtgactggcctgtaaacatctcctcgtaggcaaagtaattatttccattctcatcggttttctcaactgccttatataagccaagcgagctgttatcgttagagcctgtcatcaccctcacctttggaatgacataagcggtaccatcattcaggcacagataaaagagcccatttgtcttggaatacatgattgagcttattctctcactgttcatattgtttgatgcatcgtctgactcttcatagctgccgctcattgcatcccacagatatgatagcctgttccactttaagttctttgccttgtagctaaaaatataatccggatttgatatttcatccacacttgaatacacctttgctgcatcagattttacatctaccttgtcctctgatgtttcattgctctttaccactgcggcctgcagattggtatcgtccatcatctgcgaaaatgcattgtcatcaccggattcataattgtacaccatctgtctgctataggctcctgcaatattcgcatgaatttcatcccttagctgtgctgtgctttcataattgtttgtgtacactgcaactaacgttgttacaacaagccctgccgccatgaccgagcatactataaatgccgccagcttaagccacagattccttgatatttttttcatatcattcaccttccattttatagtgcttcacttgacaaactttatcaagcatgcacctattcagcgtcaattttgtatccgcgaccccagatgacctttaagtatcttggctcagccggatttatctcaaccttttctctgagatggcggatatgtaccgccaccgtgttttctgtcccatacggctcatccttccagacctttgcatatatctgattcggcgaatacacctcgcccggatgctccatgagaagcttcaaaatatcgtactctgtacgtgtgagatttgctgcctcgccatcaactgtcactgtctttgatttatcatccagctcaatgccgccgattaccagctttcctgcgcttgtattgcctgcgccaagaagcatgtatctcctgatctgtgacttcacccttgcctgcaactctaccgggttaaacggtttcgtcacatagtcgtctgctccgaccgtgagcccgagtaccttgtcagtgtcctcacttttggcagtgagcagtatgaccggcacattagagatttttctgatttccaccattgcctctatgccgtccatgacaggcatcatgatgtccatcaggacaagatgcacatcattgtgttttactatatcgagcgcctccagcccgtttcgcgccgggattacctcgtagccatcgctggtcaaataaatgctgattgctgatacaatgtctttttcatcatcacatactaatactttatacataattgcctccggaagttttatgttgatcttattgtatcaattgtaacattaaaatccaattatgtaacacattaagatttgtttaagaaataatcttaatgaaactcaaaagaagctccgatttactgatatcaaatcgaagcttcttttctaagttagattattatattggttatttactacatacgttaatttattattatgattaaaggggtaaaataccttttgcccctcatatcattataatagccggttgatttgtttacttcgcctggaatttctttgccagcacctttgtcaggatgttgattaagaatacgattacgagaagcacaaccgcaattccaaatgcctggtcgaattttccttcacttgtcgctgcaaggtagagcttgatggtaagtgttccacctgactgcattatctttgagaaataaccgctggcaacctttggaagcattcctgcacttcctgccgtaaagaggagtgctgctgactcacctactattcggccgattgcaaggataacacctgtgatgattcccggcatggctgacggcagcaggatggtgcggatggtgtgccattttccggctccaagtccgactgctccgtgtctgtagctgtccggtacagttttcagtgcctcctgtgtatttcttgtgatgagaggcagcaccatgagtgtcagtgtcagtgagcctgtcaggatactgtagccaaagcctattgtctgtccaaagaacatcattccgaatagtccaaagatgattgacggtattcctgcaagtgtctctgtggcaaactctattgtggatacgagcttacccggctttgcatactcattcaagtacacggctgctcccactccgacaggagtagctatgagcatggtgataattatgatgtaaagtgtattgagcaggtttcccgctattccgacagtgcctcttaagacagatgtctcactggtcagaaactgccagtttacctggccgattcccctgacaaatacatatatgatgattcccgcaagcagcactaccgataatgctgcacacagatatatgaaaaaatatactacatcatcgcctattctgcggcgttttccatttatactagtcattttccacagctcctttctttttgagtttcataagggtgaggttgattatcatgataaacacaaaaagcacaagacctactgagaaaagcacctgtctgtgaagtccgctggcgtatcccatctcgctgactagctgtgtggtaaggaaacgcactgagttgaacggaagtggaaagcttaccgttccaccggctaccatgttgatagccatcgcttctccgagcgcacgacctattccgagcacaattcctgtcatgattcctgactttgctgcaggaaccgtcactttaaatattgtctgtatctttgttgctccaagagcaagggatgctgctctcatctgctgcggtactgcctgtattgatgatacgctcatgttgattaccgtaggaagaatcatgattgcaagcactatgattgctgcaagcagatttgatccgccggtaaactgatgtgttgctgagtttgcaaaaatatgtttctccagcttgtataataccggattaagtatcataagtcctaaaagtccatagattactgatggaatggctgcaagcagctctactgccggctgcactaccgctgagagctttttatttgacacctcagtgagaaatactgccgtaagaagagcaattggtactcctatgagtatagatactgctgttcctaagatggatgtgaggattatgtacaatattccgtagcttgggtctgccgctgtcggcgcccattttgttccgaataagaggtttaacactccgaccttgaaaaatgccggtgcgcctttaaggaacatataaattgttattgataatactgcgaatattgccacaaccgcacataccgtgaatattattttggcaacattctctactatggatttatgtttcatttgatactccttgtttcaaaaagttccccaggaaacctgccatttcctgaggaaaccctgtatcttgtcgatatgtattaaaactgatgtctaatatcgatgtctgtattttgtattatttttttacttatacttactagcgacgtctcgtatcgatgtctgtattttgtattattactatgaccgttatttctactgagggaggataagacctaccttcttgataactgcctgcccctcatctgaatttacatagtcaaaccaagctttaacaatatcgttctgctcgtcaatcttgccctttgtagccattacgaatggacgagaaaggagatatttgcctgctacaatgttttcctctgttgcctctactccgtcaattttcattgctgttaccgtatcatcaagcacgtcaagtgaaacatatccgattgctcccggtgttgagcctacctttgcaagaactgctcctgttgagtcaagctcctgtgcatatttgcactgatcctttacatcaagaagctcctcgaaggctcctcttgtaccagaagctgcctcacggccgattgctacgattgcctcatcttttccaccaaggtctttccagtttgaaatctcacctgtgtagattttctttaagtcatctgatgtaagctctgttactgagttgtccttgtctgtgattactgcgattccgtcgattgctacgatgttttcctcaacaccgtttgctttctcatcatctgtaagtgctctcgatgaatctccgatatctacgcttcctgctgatactgactcgattcctgaaccagagcctgtatactctactgttactgttactccaggatttttctccatgaatgactccttgagtgcctcacaaagcttctccattgaagtacttcctgcaagtgaaagtgaaccgcttaagttctcatttgatgtaccttcatctgcgcttgtatctgcattgttgtctgctccgtctgagcttgaaccacatcctgtaaatgctgctgtcatcattgttgcagcagttgctaaaactaaaagtcttttcatacgatttttcattttaatttcctctttcattactttcctgaatttatttctttgtttgttacaactgatatagtaatggggaaatgtaaaatgcaaaatcattagtgtgtaaaatgcatgtaaaaaaatatttttaatctacaatacgattataaattcatatcctccggtggctgtacatctgttctgccggatggtggctctttgagcgttggagtctctttatttgtactttcatctgctgtattgccgaatgtatctgtgtttgcgttttctgtatcggtgcttgtgctttctgtgccggtgtttgtgttttcatcattttttttattgcttcccactcccatgttcttctgctctaaaagatccgggaatgttcctccgtttccggcaatcagcttaaggcgcgcatccagtgcttcattcgtacttatataatttgcaatgtttatcatgcctacaattgcaatgagaacaattgaaactgataacattgctatggctataaattttcttcgtaattttttgagcattttatcacctgcacattttttctatttcatgttctacatccagtgggtccaatggactttccgctgtttcatatgtcaatataagattttttccctgataatatccattttcgttatatttcaatatctttcgataagctttatttcgataatcaggattgtctatcaatccaagatgctcccacaaaattatgtcgccatttttcttctcaaccgtaaaatcgggataataaataacatctgagattttaatcgccttctcgtactcaaactttatattattatcatacaaggctgtcgcaataattacttctgattttgaccgcactataattcccattttagtataaaacttgagagcttcagggttaggaacctgtgtcttttcatttgtctcttcattttccttcttatcaactggtaaaagtatacttctataatgtttttgcttcaacattttctgggcataatccgttttatattttttccgagccttcctgtttgtctcgagtagtctgagctcatttattgtgtccttcagataaagctccagatattttttattgacaagatttctgatttctttatcatttttctttgataaatactctcttctgccatttttccaaacataccatttaacatttccgtctttttgtgtaggataaattgttccttcctcagtgattgtctccagtctttcctgaatctctaatatctcaccttccaaccattggattctattatctattgaacttattttattttcctcctaactctttgcatcatgtgatgccatgtatgtgattctaacagtaattcaattgtttttgtggggaatatgataaatgaaaactgtcatttatcttcaaaagtggagattatggtctccatttgtttgatagcaccataattttaggagctgttttggagatttctgcagtttcagctactttttctcgcaatttttccggcttttgggctgaacctatggctattgtacattatgataattgaaaaatccagcattttctaaataaaaggacataaaaagtgaattttcagaaaaatataaaaaaagttactattcacactgaacggtaacaaaaaaaacacgctatgcgcgtgctccaaaataatacagtcgataactattcagttacatccataaataaatcggcgtgacaagattcgaacttgcgacctctacgtcccgaacgtagcgctctaccaaactgagccacacgccgtctgcaattcgttttgcaactattaaataatatcacaatgtataaattttgtctaccccataatatatatttatggtatgatttatgctgtataagataaaaatttacaatattgtgcccagcctcacagcaaggtatcatacccatgactaaactgtaatttaatcacgtaattattttttatactatgaagccggcccggcagcgcagcgaccggcttagcaccacggtatataaattatcaggagaatatcatgacaaatcagacaaataacataaatcagacaaataacataaataacacaaatcacataaatcacacaaatcacataaatcagacaaatcacaccaatcacataaatcacataaataaaacagctataataaccggagcttcacgcggtatcggtgccgccattgccaaaaagctggcttcctgtggctataacctctcactttgctgccgcaattcatctgacaggctaaaggctctggctgatgagcttcactgtgcatacggaattgaggtgctatgctacaccggaaatgtaggagactttttctttgccaaggatatggttgcgaataccatttcccattttggccatatagatgtgctaattaacaatgccggtatatcgcatatcgggctgctgagcgacatgacaccggaggaatggaacaatatcgtggcgataaatctgaccggtgttttcaacttcacaaagctcgtcatcccttatatggttgccgataaatgtggccgtatactacagatttcctctgtctggggcaatgtcggagcatcctgcgaggtggcatactcagcctgcaagggcggtataaatgcatttaccaaggcactcggcaaggagcttgcgccatcgcatattccggtaaatgccatagcctgcggtgtaatagataccgatatgaaccgatgctttgatgagacagaacgcgctgagctggccgatgaaatccctgccggacgctttgccacagcctgtgaggtcgcagatatggcttactccgtcatcactgcacctgattacctgaccggacagataatcacttttgatggtggctggatttaaaattgtaattttaagttttctatttttttcgtattttttcagatatttgttgctttttatgattattgtgttacaatttgtttatgaataaaattaatgtctttttacaagaaaagcaactatcaaccattagtacaactgtgcctgacaggcttgattatctgatgaggctcaacaacttgaccaacattgctctttctgaaatcatgtgctgtgcagaatcaactatttcaggctacaggacaggccgtagagtgcctgacatttttgtcatttgccatctaagtacaatttttggtgtcacaccaaattattttcttggattcacagacgaaatttgtccaactcacaactgattatgtgatatatacatacaaggccttccggtatcacttcacaaccatcaccggctgctgatgcaaatgtcacataaaatatattgaaaaatgaaagggggaaatgttacagtctaagccaaaactgtaacgaaaaacagcccggtgcacatatcacaatgtgtgccgggttgttttttacaatatatatgatatgagggtcaaaagctattttgcccctcatttatgattaatcggtgtagtacgggtcactaaggtatacatcgaattgcatgcaggcaacagattttattgttactctgccacaagtattatcgtggttctcgcaggaactcttatggtgttgacacccaaaagctctgtcttttccgtgaagtcctctccgtcaaaatactctgcattggtgttggtgtccacatgccagtgttttccgttcggaagcaccggaagctgcatcacaagcggctcccaatatgcgttcatgcaatagaatacaatatcatcctccgtgtcctcctcatttcttccggcatacatgatgccgataagctttgtcttgtaatccgttgaggcattgaacggtgtaccgttgtgcacactgatttccggaaactggcaggatgaaggctttgtcatctttctgagtataggatgctctttcctgaactgaatcatatgacgcacgaaatcatggatttccttgaattcctcaagcctgctccagtcgagccatgaaatgatattgtcctgacaatacgcattgttgtttccaaactgggtgttgcagaactcatctcccgcaaaaaacatcgccgggccacggctgcacaaaagtgctgcaaatgcattctttataaggcgccttctaagtccgtttacatttggatcgtctgtctcgccctctgcgccacagttccagctatgtccgttgttgtctccgtctgtgttattccagccgtttttctcattgtgcttttcattgtatgagtaaaggtcatacagtgtaaagccatcatgacaggtcaggaaattgactgatgccttgtgtcctctgctctccgggctgtaaaggtcgcgtgagccggtgatacgtgtgatggcatttcccgccataccgtcatcgccctttaaaaagcttctcatgtcatccctgtatctgccgttccactcagcccatctgttccatgacgggaagcttcccacctgatacagtccgcctgcatcccaggcctctgcgatgagcttcatcttgccaagtaccgggtcgaatgccagcgactcaagaatcggcggattggccataggtgcaccgttttggtctcttccgagaatggaagccaggtcaaatctgaagccatccactctgtactcaatggcccagtgtctcagacagtctatgataaagttgcgcacaacaggatgattacagttcataacgtttccacagccactgaaattgtagtagtgtgcatccggtgtaagcatatagtacacgttattgtctattcccttgaaggagaagcacggtcccatctcatttccctcagcggtatggttgaacaccacatcaagaatgaccgctatgccattttcctttaaagcctttatcagcgatttcagctcgtctccctcgtggttgtgctcctcgttgaaggcatagctggtattcggtgcaaaaaatgatactgtgttgtagccccagtaattgtaaagctgcacaccatcgaccactctcgcgctctccatctcatcaaactcaaaaatcggcatgagctccactgcatttattccaaggtccttaagatacggaatcttatccttcaatccggcaaatgtgcccggtgcgctgactccagaggacttatcctttgtatagcccctcacatgtatctcataaatcacaaggtcctcaaacggctgctcaagctgctttatgttgccccagtcaaagctgctttttacaactctggctctgtactcaaaatccttgcctccctcaggcttttctccccattttcgctgtccagtgaccgctctggaatatgggtctaaaaggacattttcctcgttaaacagaagtccctttgccggctcataaggcccatcaaaagaaaatgcatactcaaattcatccggctttatatcataaacaagcatggagtaggtatctcctatcctatatgaatcaggaaacggaatcctcgcatacggctttggtgcctgtggcttgaacaataaaagagtacacctcgttgccccatgggaattgatggtaaagctcactccgttcgatgccacgcacgctccgtacattctgaaaaagcccggacgtatcttaaatccctctaccacatcaagtggcagcaggcctgtatttactacatcctcatgcttttcttctttactgcgctctctccacatatacatattgctctttgctcccttactatatttgtatgatggtacatgccatttgttgcatgactgctttttatcttaattcgttaaaaaatcgtaactgttcaataccttcacagttacaaaatctgctattaatttacatgcagatttccaagctcatcaatctctatattactacaattttgtgaatatgtgttcattaaattgcatatctcctgagctttttcgcccgaagccactgtcggcctgaaatcattgtatgagcttacgctgcttaaggtgcatggaataatccgcgcatctatgcccggctgcaattcaccatttatcagagtaaatgcctgctgataaatcgccgtgttcttgtctgccggatttttattgcctccgaagcagaaatttccaaggctgtagcatatcattttgccgttatagacctccatcccctgcagtacatgagggtggtttccaacaaccaggtctgctccccagtcaatgatacggtgtgccgacgccttctgatagtcattagggtaatggtcaccctctatgccccagtggcagcatgcgataactatcgccgctccctgctcgcgaagctgcgctataccgttttggatatatgcctcgcggtcgccgttttgtgacaaaaggctgaccgacactattccaatcctagtcccatcagacgtctcgtaaataccggtatgatcattgaagccatacactatcccggcatcgtcgagcacatttctcgtatcgtcaagtccctgctgtccatagtcgtatgtgtgattgtttccaagactgcaggcctcgatagagctgcccgtcataattccgatgtagctaggctttcccttaaggttccagcgcttttctacgcgctccgtcgcatccgatagcacacactccaggttgatgagtgtcatatcgtcagcctcaaaaatatctctcacaccgccaaaaaagtagtcctgtccctttgagtcataataagaattaaagctgccgtcatagctttgctcctgattgttgccgagtgtacagtctcctgtagccgtaatcactatggttgacatctgtggctgctgtgtatccgcttctgttgcctcagctttggctgcatcagactgtgtattcgctgtgccttctgccatactgtcaacggcattctcatcttcttttccggtatccgatgtgtctttaactacatccacaccattctggttagcggcttcttttatattatctgcaatatactcttttcctatgagtgctcctgccataatgatgcataaaaccaaaagcacagataatagaatttttaatcctttgtttttcataattcctcctcatattcctcacacccttagaatatcaaccgtgtgcgcacttgctcccatcaggtctgctctctcacatgttgaaagatgatactgtacaaacatatcaaactcttcctcgtcaagagcattcaaaaatggcctgatataatttgccgcgccatcggctgctattatcttttcgcgtgtaagggctgcctgtgcatttaatgcctctatatcttctaatcggacaaaactgtacaaatcattagctttttctgtacaatggaagctctcatctagcattccgccctctatgccctcttttatatgcttctcctttatggcataggttatcacgctgtactcattcataatgtatgctacaagtatgtaaccaccaggttttgtcactctttttgcctcattcaatgcggcaagcttttcctccgccgacttcagatgatacataggtccgaatacgagtgtgaggtcaaattcatcgtttccaaactttttaagctttgtggcattgccctggtatgcctttactttatcgctcttttgcttcagtctgccgaggttatgcttaactaactcgagtgctgtcacatcatagccttcctcggcaagaggcactgaatatctgcccgttcccgcaccgacatccagtattttaatctgtgagcgaagatcaagctgcttctcattcatcaagctgccaagacaatcgtgtatatacttcatggaggtgataaactctaccctgccgtgacggctgttcaggcgcttttcctcgttgaatttgttatagtattcttctaattctgtcacgtatattcctccctgtattattcctcgatatgctcacgtccctgcgcaatgattgtgcgcacatgtccgtcggcaagtgaataaaacactgattttccctcacgtctgctgtttacgagcttgtttgcctttaatatcctaagctggtgtgatatggcggactgtgtcatgtttagcacctttgcaaggtcgcagacgcatacctccgcttcaaacaacacaaagaggattctgatccgggtggaatcgccaaacactttaaaaagctctgcaaggtcgtagagctcggtttcctccggcattgtatcatttactattttcagaaggtcttcgtggatttcgttgcagtcgcagcattctatctgttcatttattttttcgctcatggtgtggtgtccttcctgcgttattcttgcgctatattgcgttatttttactttattggctatggggctggtgctccacataaattgcatgtgccttcgcagttacacaataacttttttatacgcgaaagacagagtgcacttcttgggtgcattctgtctggtattttttatatagtagttttatggcattttgatatctgctctttgatatctgttctttgagctctacctttttagagcttgtgtacgaataatgcgcggattgcatttagcactgctatcaccattactcctacgtctgcaaatattgcgagccacatattggctattccgactgctccgagcacgaggcagatcagcttgatgcctattgcgaagtatgtgttttcatatactattcgcagacatttgcgcgatatttttattgcttttgctatctttagcgggtcatcatccattaggacgatatctgcggcttcgattgctgcatctgagcccatggcgcccattgcaattccgatatctgctcttgagagcaccggtgcatcgttgattccgtctccgacgaaggcgagcttttctttactgccctttcttgcgagcagttcctccacctttgctactttatcgcccggtaaaagctcactgtatacttcatcgattccaagctctgccgctactgagtcggctactgtccttgaatcgcctgtaagcattattgtaccttttattccggcttttttcaatgcttttattgctgccgctgaggttggctttatcttatctgagataaggatatagccctcatagctgccgtctatcgcgatatggactatggtgccgaccttgtcagtttcactgtagcttaagcccagctttttcataagcttgtagtttcctgccgctacagatacgccatctacctttgcggtgattccgtggccgctgatctcctcaacgtctgtcacacgggttctgtcgatttcctttccatatgccttctgtaagctcctgctgattgggtgcgatgagctgctctctgcgagtgctgcgtactcgagcaccttttctctatcgagcgtattgtcgtagactcctgccacctcgaaaacgccctctgtcatggtgccggtcttgtcaaatacaacgtatctggtctgtgataaggtctcaagatagtttgagccctttacaagaacaccctcgcggctggcgcctccgattcctgcaaaaaagctgagcggaatactgatgaccagcgcgcacggacaacttattacaaggaaggtaagtgccctgtatatccagctgccccactgtggttcagctgacatgaaaagtattctgaaaagcggtggcagtatcgcaagtgcaagtgcactgtagcagactgccggagtgtaatacttggcaaattttgatatgaagttttctgattttgatttctttgagcttgaattttcaacgaggttaagtatctttgaaaccgttgattcgccaaactctttggtcgttttaatctttaaaacaccggacatattgatgcatccgctgattatctcatcaccgcattttgcatccctcggcacgctctcacctgtaagcgcgctggtgtttaatgtagatgatccctcaactatcacaccgtcgataggaaccttttctccgggctgtaccacgattactgagccgatagcaacctcatcagggtcaacctgggtgagctttccgtccacctcaatattggcatagtcgggtctgatatccatgagctcgctgatattcttacggctctttccgactgcatagctctgaaacagttctcctatctggtagaagagcataacggctatagcctctgtatagtcaccattctcataaagtgcaaccgctatcgcacctacggtggcaaccgccatcaggaagttttcatcaaatacctgcttgtttttgattcccttaaatgcttttttcaggatatcgtatcctataaccagataaggcaccatgtaaagcaggaacctgataattcccttaaccggtatgaaatgtaatataatcatgagtaccgctgcgattatgatacgcacaagtacttttttctgctttttattcatacgccatagctccattcattataatctcttgataatcacccttactataacgcaggcattgaaataatatcgtttgtcattcctgcacccgacaatttataagaaaatctcgcaatcatcctctacctttttacagttcttaagaacctcctgcataaccgcctttgcatcctgtccctcttcaaactcaacgctcatcttgagtgtcatgaaattgactgtagcatcctttacacctgctgtattctttgcggcatcctccatcttgttggcgcagttagcgcagtctacatcgattttgtaagtcttcttcatagtggtgttctccttatttaatgaattatttgttttactgtacgtttttcattgaacatatgaatgattgttcatatgttgattttattatagcaccttttgcactgttgtcaatacacaatgtgcatctaaacataaaatttattcacatactctaatcacataattaatctcatagtttatgattcaggcttcatctgtgatattttctttccagctgcttccctcttctatcccgtttgccgtaagccattcatcctcaacctctacatgacgctgtctgccgttttcgtcctcgagataaaccacgcattttgcttttgcgccgtctgctctttcctcacagccaaaatcagcctcatatatgtgtgttaccgtatacatctgcactctaccttctttcatatgattttgcatgccataaatatatagaaacttcccacatgtacaggtggatgtgtccactctaaaatatcatgtgggaagctgtttatcaactatatttattattataatgctgctttaatcgctgcaagcagctcatcatatgtctcatatgcaggaagctcagggtagtccttctttatagcatctgtgcttctgaaaaggaaacctgccttgctggcctgtatcatgcctaaatcgttgtggctgtcaccgcttgcgatggtatcatatccgatagactgcagtgcctttacagttgtaagctttgactgctcacatctcattctaaagcctgtaatctcgccatcttcagcaacctcaagctcgttacaaaagattgttggccagccgagcttcttcatgagcgggccagcaaactgtgaaaatgtatcactgatgatgattacctgtgtgattgaacgaagctcatctaagaattcctttgcgccaggcattggatctatctttgcgattgtctcctgaatttcttttaatccgagtccgtgctcctttaaaatatttattctatagttcatgagcttatcataatcaggctcatctcttgttgtcttctcaagctcaggaattcctgtctcctttgcaaatgcaatccagatttcaggtaccaatactccctcaaggtctaagcatacaatattcattttgattcctccgtgtgttttattctgtggattccgatgaaactcaatataattgtcaggtaactatttaagcagccttgaatagttacctgatatttagttcaccgatttaatccagtaaagtatatcatacaagacgactgtctacaatagaattatacgtgatttttcaaaggatttttcagtaaatcattattaccgtccattacgctcgttggcttttgcacacgcaccggcttccgcagagaagacgccctcatcatctatgatatttccgctatcaacatgctttttcaggatattgttaaacgcataatcccagattttctctgagccaagtgctgtgcgcttatttctgccgagtatctgcgacagctttacactgtgctcacgccatgaaagcccatccgatgcatcgtttaggagcattggctggatattgtccatggtgcgggcaaatctggcttccggtgtctgctgcgcctcaaattcctcccacagctttaaaagcggctcgccctgttcctttggcaagagtccgtatatacgctccgccgccttctgctctcgctcatgctgtgtggccttgcctgcctcatcataggcatatgtgtctcctgcgtcaatctctactatgtcgtgtatcaaaagcattcctactgtctttagcacgtctatcttctcattggcatactcgctcaagagcatggtcatgatagccatatgccaggcatgctccgcatcattttccttgcggcttgcatcagctaaataagtctggcggaatatctccttttccttgtcgatttctctgatgaaatcaagctgtttttctaatcttttgtctttctcattttcctgcattattgtatctccacgttaattctcatcatatttgcaaatctgcatctttttactttattatgaattaaccaataattttgtcaagcggtcaatacaaattacagcgcatccttcattgctttaacatactcaccgacatactttggtgaagcctcaccatactcatcgattatcttgatgatggcagagcccacaatggcaccatccgagatatctgccatcttctttgcctgctttggtgttgaaatgccaaaaccgatagcacatggcacatctgtgttttctctgattaccttgactattgaagccagatctgtcttaatctcgcttcttgtaccggtgactccgaggcttgaaatcacatagatgaagccggttgcctcctttgctatcatcgcaatgcgatcctttgatgtaggcgcgataaatgaaataagatccacatcatatttctcgcagagtggtaaaaactcttccttttcctcatatgggatatccggcagaatgagtccgtcaatgcctatttccttacatgtactgataaacttttctgcgccgtatgagtaaaccacgtttgcatatgtcatgaaaaccatagggattgtgacatcttctctcaaatctttcacaaggtcaaaaaccttgtctgttgtaactccggctgcaagtgcctttatgttggcgccctggattacaggtccctctgctgtaggatcagagaatggaattccaagctctataaggtctgctccgtttgcaacagcttctcttacaatttttgcggttgtctctaaatttggatcaccacaggtgataaatggtataaacgccttgccattttcaaacgcacttcttatcttactcataaatattctcccctctgtatcttgctattgccgcgcagtccttgtcgcctctgcctgaaacagtaacaacgattatcttgtccttgtccattgtaggcgccagcttcatggcatatgccactgcatgtgaggactctattgcagggatgattccctctgtctttgcgaggtattcaaaagcatttaccgcttcatcatctgttaccggtacatattttgctcttccgatatcgtgcagatatgcgtgctccggtccgactcccggatagtcaagtcctgcagaaattgaataaaccggcgcaatctgtccgtatttgtcctgacagaaatatgacttcatgccgtggaagataccaagacggcctgtatttactgtggctgcagtctcaaaggtatctattcctcttcctgctgcctcgcagccgatgagctctacgccctcatcctctatgaagttgtaaaagcttccgatggcatttgagccgccgcccacacatgcgataaccgcatcaggcagtctgtgctccttttcaagcatctgctccttgatttcctttgagatgaccgcctggaaatctcttacgatggtagggaacggatgtggtcccataactgagcccaggcaataatgtgtgtctgaaattctcttggtccactctctcattgcctccgatacggcatcctttaatgtggctgtacctgatgtaaccggtataacctctgctccgagcagacgcatgcggtatacattgagcgcctgacgctttgtgtcctcctcgcccatgaatacaacacattccatacccataagggctgcggccgttgctgttgccacaccgtgctgaccggctccggtctcagctatcagtcgggttttgcccattttctttgcaagaagtgcctgacctaatacgttgttgatcttgtgcgctcccgtatggtttaaatcctctctcttaaggtatatttttgctccgccgagatcctttgtcatcttttctgcgtagtacagtctcgatggtcttcctgcataatcgttgagaagctctgtgagctctctgttaaattcaggatcgtttttgtaataattgtatgcttcttctaattctttaacggcattcatgagggtttcaggaatgtactgtcctccgtgaataccaaatcttccgtttggatttgtcatgatgttttcccttctgatgtatatttgtaaatattttgttttctgtactgaatagttacagatattcttaaaaccatgaagatacttatatatctctattagcttaatcgcaattcatcaagcttagcctttttgtcgtccgctctcatcagcgtctctccgataagcactgcgtcagctccgatttcacatattgccctgatatcgtctgtgctctttacaccgctttccgatacaaatatgatgtcatcgggaatcaggtcacgaagctttctgctgttagctgtatcaactgtaaaatccttcagattgcggttgttgacacctattattctggcaccggctcttaccgccatccctgcctctttttcatcgtgtatctccacaagagcgcttatgccaagactgtcacatatttttatgtattcaccaagctgtacctccgacagtatggagcagattaaaagcaccgcagcggcaccgagtgtctttgcctgatatatctgatattcatcaaccgtaaaatcctttcggatgcacggaatcgaaaccgtttttgcaatctccttaagatactcatccgagcctaaaaaccacttcggctctgtcagtaccgagatgcaatccgcacctgccgcctcgtattcccttgcaatttcaagatatctgaaatccggctctataagcccctttgacggcgaagccttcttgcactcacatataaagctcaagccatcctttttgagtgctttttcaaatgcaaaatcacaaagcttttcgtttttcgtctgaatcgcaatatttttcatttcctcaaggcttatttttttcttgtcatctgccacgcgaaaccttgaatattctgcaagctggtctaaaatattcatcgcttttcctttcctgttttgtgtgcctagctgttgcttacctcgatgagcttatcgagggtttcaagtgcttttcctgaatcaatgatttttgctgctagctcgataccctctttcatgctgtcggcctttcctcctatataaagtgatgcacctgcgttcatgagtactgcatttctcttatggcccttctgtccgcctaagatatcacgtacgattttcgcattttcctcaggtgtaccgccttttaaattctcctttgtacagcgctcaaagccgaaatcctccggtgagattactgtggttctgaaccatccgtcctttatctcgcatatcttggtcggtgcgctcatggaaatctcatcgagcttatccatgccatatactaccattccacgctttactccgaggcttacaagcacctgtgcaagcggctctacaagatactcatcatacactcccagaagctgcatggccggtgaacccggatttgtgagcggtcctaaaatattgaatacagttctaaaaccaagctcttttctgataggtccgacatatttcattgatgtgtgatatttctgtgcaaagaagaagcacataccgactttatttaaaagctctacacatttctcagggctctggtctatgttgacgccgagcgcctcaaggcagtctgctgtgccgcataatgaagaggctgccctgtttccgtgctttgccaccttcatgccacctgctgccgcaacaagtgcagaggttgttgaaatgttgaagctttgtgcattgtctccgcctgttcctacgatttcgaacacatccatacctgttttcacctgtaccgcatgctctctcatggctgctgcacagcctgcgatttcgtctgttgtctcagcctttgcgctctttgtggaaagagctgcaagaaaagctgcattctgggttgatgttgtctcaccgcccatgatctcattcatcactgcatatgcctcgtcatatgtgaggtcttctttgtttacgatttttactatggcttctttgatcatgattatgccctcctgtattcaggtaatatttcgtttataattttgtttatgattttgttctgctatttgttttcaattcaacaactaatatataaattcattaaacgctgcaattttcaattaagctttgataaaattactaagcatctgctttccgtccggtgtcatgattgactccggatgaaactgcacaccgtatatcggatattccttatgctcaacagccatgatctcaccatcatctgtagtggctgtaatctttaggcaatcaggcatcgtgtccgcatctgcagcaagcgaatggtaacgtgctacctttgcttttttcgggcaacccttgaataaaaggctttctgtgtcaaacgatgcatccgattgctttccgtgcatgagctcctttgcatatgtaactgtcgcaccgtatgctgcgcatatcgcctgatgtccgaggcacacgccaaggattgggatttcctttccaagctcctttgccacagctattatcacgcccgcatcctcaggccttcccggtcccggtgataatatgatgcggtcaggctttaaagccctaatatcttcaactgtcatctcatcatttctgattactctgatatcaggctctatctcgccgatcagctgatacaaattgtaggaaaagctgtcgtagttatcaatcagtaaaatcattcttccacctcctgtgagacttccagtgccttaagagaagcctttgccttgtttatgcactcctgaaattccttctcaggatctgaatccgcaacgattcccgctccgcttctcacgaaaaccttgccgtttttcttgtaggcaatacggattgcaatacatgtgtccatatttccggtaaaatctatatatccgatcgcgccaccgtaaatgcctcgcttgttatcttcaagctctccgataagctggcacgctctgatttttggcgctcctgaaagtgttcctgccgggagcacggcctcaattgcatcgagtgcgtcatactcttctcttatctctccacgcactgtcgagcctatatgcatcacatgtgaatatctctctatggaatgaagcttttcaacttttacagttccgaatctactcacctttccgagatcatttcttccaaggtccacgagcatgttgtgctctgcgagctctttttcgtccttaagcagcccttcctcaagctttttgtcctcctctgctgtggcacctctcggcctcgtgcctgccagcgggaatgtgtgaagcactccattttcaagcttcacaagtgtctcgggagatgctcccgcaacctccacatcggttcccgaaaaataaaacatgtacggcgaaggatttatcgttcgaagcactcggtaggtatcaaaaaggcttccctcaaacggcgcgctcaatctgtttgataaaactatctggaaaatatccccctctttgatatggtgctttgccttctcgaccatctcacaatactgctccttatcaaaaagcggtgtaacctcgcccagcagctttccacccatattctgttttttctctccgtgcatcagaagctccctaagctgctttagctcaacaatcgctttgttgtagcctgtttccggagcatcaagtgacatatttgcgattagtattatcttctggcacagattgtcaaatgctattaccttatcaaaaagcatcagatcaacatccttgaaatcctctgtgtcccttgcttttcctctgatgcttttctccttgtagcccagataatcatacgaaaaataacctacaaggccacctgtaaacgaaggcagataatcaaatttcggactcttgtactctgaaagaatctgtctgatgtactctgaaggattttccgtctccaccgaaagctttccaagcttcatgtgaccatctatgcagttaatctcaagctttggatcatatcccaaaaatgtatatcttccccaggcttcattggcttgtgctgattcaagcagataacaatgtgttgaaacattctgcagaattctcatagcctctataggtgtgataaaatctgataatatctcacagcttacagggagaatgtcatacttcccggtttttgctatttctttaacttcagtcagtgtaggtgaaattttcatatgcttgcctccaaattttgtgtggtagtgaataaatgtccaatgttcaaccgtgaacaaatgcccaacatacagctcaaattcgcctcttcgaggcttctgtgcagcttacgctgctacaattctcgctttatgttgtgcagtccagtgtttaaccgtgaacaaatgcccaacatacagctcgaattcgccttttcaaggcttctccgcagcttacgctgctacaattctcgctttatgttgtgcagtccaatgttcgttcgcaagcttgcatgcgagcatgcagacttgcaaactccattgtacctctttgttcactaaaaaacgcccttgacagaattttagttctgtcaaggacgaataatcttaactatccgcggtgccaccttgaattcacgataaagctcgtgcgcttggcaggataccaacatatcccgggcaaatgacgtatgcccacacgtcgcagaatactctggatgaatgataaatccatttgactgcgccctcagcggtccatttgacaacttgtttcacacctgattctcagcaccacaggctctctgtaagggcatcattgccgttatctccgcttcaacggtttacaatttattgaattgtcgaaacagtttaaactgttttcacttctttaacgatttaatactttatcttgctaaatttgtttagagtttatcactcctgtttgtgtttgtcaacatatttttgccccgtttttctaattatatacattttattattttcaaaaaccatatttaattgcattctgcataaaacatattcccccattatttgatatattttgcattgacatatttcgttgcccttgcctgccccaatttcataacagaacctgtttttaccatttttccaagcactgcttctactgtagacggactcacatcaggaaggatatcacagatttcggcttttgagaccggaagcacgctgtttaaaactgtctgctcaactctttctgtttttttaagttttttcccatttacagtagaaaatcttttgtccaattctttgtaacatttatagagcatagacagaaaatttttcatatattcaaaatatgaattctcatttgtatgccatcctatagatgactcctgcaatgcctcgtagtaaaaatcctttgagtcattgatttgttcctcaaaggatacatattttccaacatcatatccacttttataaagtaaaaacaatgataataatctggatactctgccattaccatcagaaaacggatgaatacataaaaaatccaatatcacacatggaatcagtaacaatttgtttatttttggattatctcttgcatccatatatgcaagtacaagctgctgcattgcttcgcctgtatctgccgcagaaaccggtgtaaagcgaactctacgccttcctctttcatcaatctccattatcagattgtcttccgttttgtattttcctgatagctcatatcctgcaagatttgtcatcgtttcatgtatatgcagaatcatattttcactaaatgacatctgatcatgcttagaatgtatctcatccagtgcatccctataccctgcgatctcacgctcatcatgattaagaggagcactgtcaccgtcaacaatctgctttatacgtgcgtctgttgtaacaataccctctatcgcattagaacctttaacagattgtactcttgcaatcttttccagctcagtatatatacttttattgctttccttacgcgtatctgatatagcattaaatgcagtaattgttgctgtaagattaactatctcagccggtaataagccctcatctaaaaaagaatagtcaaatatatgcatattgtcctcctgttatctgcatatattttatcaaaaaatgtgcagatgctcaatcagtatctgcacattttttaaataatattatgcattaaaatcgtaaaccggtgtgtgtttgcacattaataacataaaatcgcctcgcattatataaattcgattgataaccttattatagttgttattagatgtgtaatcactcaaaaacaccgactaatctaaagtctgattttagattagtcggcattctggttttctataaaatatactccatctggcgttcctttgtcttaagccccatcttctcataaaatttctcagcagatgtgtttccgctccatacattgagagtgacctcgtagcagccgagattctttgcctcattctttacatattcaaaaagctgctctccgatatgcgctcctctggtctttgcatctacacacagatcatctatgaaaagtgatgtaaacggcaccatattgttggaaaacggctgctgtcttacctggcagaatgcatatcccatgcatacatcgtcatcatctgccgcaacatatatcggctttgtatcgtcctttatcatttctgcaagctcttcatttgtatattttgtcgttcccggaataaaaatatccggtctgatatcggcatggatctgaagcacctgctctaacaattctataagtcttggtatgtctttttcgtgtgctcttctaatattcatttttgagaatcatccttcctgttgtcgttaatgtatagtttttatatttcaaaataaatccagcatattatcgagataaatgtgctctctgacatgtatctgatactgtggcttcgtcatatagtagagcagaaattcaagtatcatagcacttccaagccctctgccctccattttaaaattgctaaagcccatcggcagataagtgttttttatatcatctattccgataaagccgggattttccattgccttcgaaaagagatatccctgccctgcatcaggtgcagtacaataatgctccgggcaatcctcgcccagatttttgcggctaaccgtctcgtagcatttcttcctgtccgtgcagccaaaccagcagcactcattgcacaaaaattctactttttccttttgatgctgtgataatgctttcagtttatcaaatgatttgttcaacctgaaatccggtactacatagcggaaatcctctctgttaagctcattttcaaattcacaaaaatccgtcagaacctttgtggttgaggatataaaataaaagtcaaggtagttttcttttatgtaatcaagcagaatatctgagtagatgattataccgtttccaaagcccctgcttcgctcattatctctgcctatatcaaatatcctgcacagttcgttacattttttgtcaagaagatgctccttagtaagcaatgaattgctaaaggtaagtctcgcggatatcccatattcctgcatcagcttaagcacttccttcaaatcgtgctcaccaaaaccgacgcggcctccgccccatatgcagtctgccggtgcaccgtatattgagcctatgtcgcaccagtcatagaaatattcccggtgcttgcggtacagtgggagaaattctttgtataattcataaaattcaaacaatcccggtagatgataatacgctttcattttgactccttattttaatccgtaccagactctcaacagactctagtatacttctcccaaatgtaagtgtaaaatcccggagcgtattgtatgctttgatagcatatcaatatcacgctccggggtttctatttacgcctgatttagtttaagaaattctgtatgataacttcctctgcctcttcctctgtaagtccgagtgtacggagcttgagaagctgctcgtcgtttatcctgccgattgctgcctcatgtatgatagccgcatcgatattttttgccctgatttcagggattgaacctacctctgcatgatccatgatgatagaatcacactggatatgagcctggcatttgctgttgccgatggcattcggatggaaggtctggactgagtttccttttcctacggatctggaaacaatctgtgcagagctgtcctctccgtttaactgcacctcgatatttgactccgccttctgctctccatctgtcatgagacgctctgtgacatagagctttgcgtcctttccaagctccacattggtctcacggactgtagaatcaacaccctttatctgtgctgtatcgagtgtgaaaacagaattctcacccacaaatatatttgttacagggttgagcactctcgcacctgttccgtttccctcgccgtaatgcttttcctcatatcggacattcgcatttttgcctacatggaatgtatggatgccgtcgtgtctgctctcgttgcatccgctgttgtggattccgcagcctgccacaatccttacatctgcgccatcctccacatagaaatcgttgtatacaaggtctgtcatgcctgatttgctgagtactactgggatatagacagcctctccgtccgtctttccatcaatataaatatcaatgccgggcttgtccgtctttttctttatcttgatgtgctcgctgtctccgtggcagattgatgtgccgttttcacgcagattaaaggcaccggtctgactgaatttattatcatttatgacgtccaatacgccctctgttacgttgtcaagctttaccatattatgctcttccctccagtctctctacgcatttgtgacatttctgtacaccattgagataaggcagcacctcgtcctttgtgccgattttcttgatttctccgccatcaattatcatgatgcggtctgccatatttatgattttctcctgatgtgaaatcactatgaggctctgctttttctcagtatggatttcctcgaatttctgtatgagcattgaaaagctccacagatcgattccggcctccggctcatcaaatatacaaagcgaatgctccttggcaagcactgatgcaatctcaattcgcttcatctctccacctgagagtgtgccgtcaatctggcggtaaatgtaatcctttgcacagagtcctaccgcggtgagaaggtcgcagcactccttgtctgaaagctcatcctttgcggcaagcttgagcagcttcatgacggtcattcccttaaatctcggtggctgctggaatgcaaagcctattcccgcatttgccctgtgattgatgtcgagctctgtgatatcctgtccgtcaagtataatctttccgctgtccggtgtctgaatacctatcaagctctttgccagagtggattttccacctccgtttggtccggtgatgacaagcatctctccgtcctctacctgaaatgatatattattcagaaggcatttctttccgccctcatcatctacgtttaaagttaaattttctgctttaagcacgattttcacctcatttttatttatgatacagcataaaatcattctcctgctgttcttattactttttccgtttaccgttcacattcacacattagtatgcccggcaatgattacagtataacataatagtaaacgtttacaaggtataaactctctggtactcgctaaaatacatattgtggctttttataaaaagtttgcttatctactaatttcccttatcattgaatactcattgcacaaggttccgtcattttgtctgatagaattaaatttgatgccagttatcctgaagcccatcttctcataaagtgctctcgccctgctattgccctcaataaaatccaattccatctgcaatatattcggattgctttctgctatttttatcatttcccggaacattctcgttccaatcccctgattccagaattcgctcagcaaaccgattgccacatttgccctgtgtccggttttcgcgcgtttattccaccagaccatgcaatttccggcaatttttccatctgcttcacaaaccagcaacgtatgtgtatccgacaaattgcagctatttatgaaatcaatctcctgctcgatggtccgggtctcacattcttccggtgtcctcagtaagaaatccgtttcaccggttgactttttcatgtactctataagagctttggcatccttttcatttgcacttcgcaaaatggcatttctgccgtcttttaatttaaattcgatatcttttattatcatattttctacagtaccaacttcctattgatttttgtgttctatctgtgataaactatcgacaattaatggtagttgcagcttagacagagcgagacgaaagtttccctctgtctatttttttgcgcttttacgtgcatgaagccttgtatacacttcaagcctttttcaattatcgcagctatcaagagtctattgtaactactcgttacagctatatttattttacataacaggaggatttaagaaaaatgccaaagaacagattacaggaaacagtttttaccatcatgatggtgcttgtcatggtttatgccatgatatgctacaatattgcccttgaaacaggcggtatgaagaactttgtttttaaggccgcattaggcgaatttcctatcatgattgttgccggttttattctcgatacattcattgccggaccacttgccaaaaaatgcgctttcaaaatagtcacaccgggaaaggacagacctattgctataatccttgcaatttccgtcttctcaatctggtttatgtgtcctatgatgagctttatcgctaccatccttttcaatggtggttttaattcacagatatttgcgacattctgtgagctcgtcgtaagaaactttccaatggccttcttctggcagctctttgttgccggaccacttgttagattcatctttggaaaaatcttccgagagaactaatttaaatgtaaaaaatgtaaaaccgggcacgatatcctgcccggtttacactatccataataactgttaagcatcacaccttgcatattcacaaaaagctcattgcagatgtcttctcgcttcttagaaagcttcgtaaaacgctttgtcctagaaaactccgtctataaagcccttcatatcatccttagacacaagaccaatctgctgaccggcaacctgaccgcccttgattgcaataactgccggaatattcattatacgatactctcttgccagatctggattctcgtccacatcaatattgtaaaactccacatctgtgatttcatcagaaagctgctccattacaggcgcaagcatcttgcatggaccgcaccactctgccgaaaaatcaacaatgatagccttattatttttaacctgttcaaattcactgctattaatcttctttaccatagttgttctccttccatctgtcgaacgaattattttcgttgcacctatacagcaataaaaaataactgctatactatagtacaccaaataagaaataacaatgcatcagaaacttattattcggtgtactagcactactataatacataaatcagattatgtcacataaaaatattataaaccgtaaaatttatcatttatcacgattaattctttttgtgctctgccatgtaggcctctatatcctctgtggttctgatgatatcctccgacagacacactgcaccgtcctcggtgataagcacatcatcctcaatcctgataccgatttcccattcatctatatacagtcccggctcgtcactgatgattgctcccggacgaagcctgctgtttgagtcaactgtcacgtcatgcacatcaattcccagatggtgtgacacgccatgcatgtaatacttagatatttctacagaattctttatcagtccaagtttcataagcccgtctgcaagcacatccttacatacttcatttaattcctttgtagtcattcccggctttgcaacctcgacaatctttcggtttgcggcgagcacgatatcataaacctgtttctggcgctcggtaaacctgccatttaccggatatgttctcgtaatatccgaattgtagccatctattctggctccaaggtcaagaagaaccagtgttccatcctccatcgtctcacgatttgtgtcataatgaagcattgttccattcattccgcttccggcgattgtagggaacgctgtccactctgccccaccgcgtcttatgatatattcaaagtctgcctgtgcctgatattccttcatgccaggctttaaattagccattacattgcaaagtccgtcctttgtgagagcgattgcctttttggtaagttcaatctcatcctcatccttctgcatacgctcctctgccacaagcgggaaaagattcttcacagcaactcccggataatcactcttaaattcattggcttttaccacattgtaatccggcaaatccactttctgatgacgatacgtgtcgaaatatgctgtgtatacatcctcacgcgtcattatcctgtccagtgtgctctcaagctcataaatatattctatctcatcaattcctgatacttcctcggcttcctccatagtcacctttctgccgtaccagcgctccatcgtagggtctgcctcctctatgaagagcatcgtcttagcaggctctacacatttatccagaacaaggaccatgttgtcacgtctaagtccggtcagatagaagaaattgcggttagcctgtgctgtgaataaatcatactcatctgcactcacatggtgctcgatgcctgagtacaatattgctatagaattgtcctccatcttgtctaaaattctttgtcttctgctttcaaaatccattttgctgcctcttattcattatttgtaatgcctgtcttcaaaaaccgctgacattcatacgcccttacgttatcacaatatatgtatttttacaagccatttggacccgctaatacaggaatcaaaggttttctatatttacatattttcttttcccatttgcatactctacataagcctgtttcttttcattatcataaccggctataggttttttacatattttcgctttatttattgctgccttaacagcttcaactgccctttcgtccatttcattatccgattctgtcaatgtactcttctcttcttctctggatacaacttttatgattctaccacttttggtgctcacagttgtcatataatcactccctctgttttgattaatatttaaatatattatctattatacttgtttactttttattataatatttattttatcatagttcacacacaaaaacaccccagaaccgaagttctgaggtgtaatatactcttgatattctcttttccgaaaaattatctcttgcataattccggacgcccatttttcgggcgtttcccgctcatttgttagttacctgtgctttacgcaaattttctcgacttgtcccctgctatcttattatatcacaactgctcgaattgtacatgttcagattctccggataaatacaaatctccgattgttctaaccatcttctttccgtccacaacatgaatctctttcacataatacgactgtcctctgatagcacgaccgcagatgttctcatttccccacgctgcggaacgtctgatattgagtgagccgtcgcaaatgaccgtcactttcattttgccctgtggaatgatgaccttgtcctctgcctcctgtggctctgtatttgccccattctcgcccgtttcgggttcatccggaggatttgtcatctctgcatcgtttgaggcgttttccccgctctctgtgtcctcctgctgccccgctgcatcctcaccgttctcgaatgtcgtcattttctcaacggtttctgcatcgaccgtcccaatcttgtttccgtcctcgtcgtatgcgttgacgctgccgtccggattcgtctgcaacgctccctctggaacgttgtccgtgagtgagccgatgatatttccgttttcatcccacacgacgagattctcgtcctttgcagctgctctcattgctccctcgatggtcttgtactctttgcagtcctcttttttgaactctgttcctctgcctaaatagtataacatgattatccctcctatttgttcagatacctgcttgacgcatatccgacgatgttcttgtaaaccacatacaaccatttcacgccgttgcagtcgttataatatccatagcaatgaactttttcaccattgttcatcaccgcaaggattgttttccctgttcctgctcctgcacggagattcaacgctgacgctgtgaccttgtattctcctgcaagttttttgtcgaatccgtatgcaacgtcggtctttgtgtcgttcttgactggtgttgtgttggatgcacccgctccggatgattttgctccgtctgtgaggtttgttgcaacgtgagcattatcgttgaggagaatgtcgccctcaagcaaatacgcatccgatgtcagatatttgctatctgtcagtacctcgaatcctgctgccttgagacctgctctcatgtttccggtatagagataaatgctcacattcttcattttctcatttcccagtctgtaacccgctgcctttacgattgcagcgacaccggatgaacaatcagcctcacacgcaatcgtgatctgtgcagggtcatagttcgatgccttgagatgctcccaaaatgtatagcgttcagactggtcatatccgattttgttgttgaccgctgctgcctttgccatgcttgcgatcatttttctgacctttgcatccggatgacggaggacacatttccacgggcgattataccagtttataacctgccactctgtccccgtctggtctcctgcctttcctccgctatatctgttattttcatcatgtccacaatttgaaatcatttgttttcctccttgtcaaattcatctgctgtgaatccgcataattccggattcttttcctgtatcttgtcgtatagcatcaagcctccgacgatcaacggtgtcgcccaccacatcaacgcagcaggtatcgaaagaataaatccgcacaccctcgtcaccgcttttccgaatctcgtctcgtccgtgtcgatatggcaatcaccgcactccctcatttcctcccgcatctctttgtctaaatcaaaagagattttccaaaagaaaatattgactgctgcaaatacgacaaccgccatgattgcatatatcagcacaagcatccgcatgtttccggtcatgaaattacatatctttttcaccgacctcacctgcctcaccgttcacaagttcctgcatcgctttgttgctctcaagcatttttttcattctctcaagtgcttcatcgaccatcatcgaaaaagcctcaaatgagatcactcttgcaagccatgcaaaccgtgcaacgaacatgtcatatacataccgcagcttgatttgacctgtaccgcctcccagttccttttctgcttttgtgactgcataaagcagccattctctcgctttgttcaactgcttgtctgacggcattttcacgaaaacatatactgcatatcctcccgctgccaataccgcaatcagacccacaatcacgaaccaattctcgacgatgtatttcatccctgtgcctcctcgtcattctgctccggttcatcattgtgttgtattcctccgtttgattttgttcccttgaccgttttcacggacttaatgagtgccattgccccgccctcaactgaaagaaatctgaatacattttcaatcagcgttgacggttctgaccctacccgcaaaaacacaaatatcatcacgactgtaaagataaatgctgcaagaatcattgtgaatacaacacgtttcatgaacagaccggaaacctttttgtcatgtctctcttttcgctctcttatccggtacattcttttcagatgccggattctgatgcgacgctcctgttctgtcattctcatgtattgcctcttttctgtgaggttgattcttgcctgtttcctgccctcctgttatcggtcggaatttctttctccgtccagtctcttgtgacaactcttgagtgactgttccacgatgacaacacgctctctcaactgtttcatctcctcacggttctctttcgattcccgcttgatgtctttgaggtcatccgcaatgttctcaagtttcaccatcaccattgtgtcggtcgttgctctctgttctgcatcttcctgtgtgtcctttttctcatttctctgctttgagcagattccgaaaaaaattgcaaacgcaacagatactccggagagcagcaaggaaatctcaatcgtcaacggcattctcctttccgaactctgtcgcctcgatgtcgtcggtgtcgcagtacctccgcatcccatattcaagaacatccatctctctgtctgtctcttttatgtcctgccggagttctgccttgaccgcctcctcgattttcgactgttcaatgattgtttgctgctttttcacgattgaggatagattctccgtcacatcacacaaccgtgatattatttcaagcggactcattctgcatcaccgccggagtattcctcccctgtgatgtattcatattcctccgctgaaatgctacctctcgccactctctcggcgatctgctcctttgtgagcgtttttttgactgcgtacattcttttcagactttcaacaagtattctcattaaatcagtccctcctcgatcaactgtgcggtgtattcgtcgatgaccgcatctttctgaaactgtgtcacggattcaacgattccggatgtgttctcctcgacaacggatttcatgagtgccatgttctcatattcctcgaccgtcatttccttttcgtcgtactgccattcggtcacggtctgcatctttccgtctgctccctcaacctctttctccacctgttcgatgtttttacgcagataaaccgttgacggagacgatgtccggtcgatctcctccggacgttccggctgtgttcctgtcacctttttccagtctgtcatgtttctcattctcctttctgctatgctttgaaactatcctcttgagtttcttgacattgattttcggtttgatgtactcaacgtaatagttgtatgtgtccgtatgtttgaacaatcccatataggacaacatcaccgatgcgttataccatgagattttatcctgctttgagatgtggttcgccttacgcctcgcagcttcgatgtttgatttccggatggttgtccggtcatggtgaaattgaaatcccatgaaatcaagcatacgaccctttgtgacctgctttccgtctttatcaagtaccggattcccgcctttatcaaataccggatattcaaatctaaacacctgccaatcgccttttatttcaaggtcgaggttgtcattcagatatgtttcgattgctgcatgtattttgtgtagtttctttttgctctttcccagtatcaccatgtcgtccatgtatcgcatgtaatgttctgcacggagttcctctttgatgtagtggtcgagtgctttcaagtaaaaattgccgaaccattgtgatgtgaaatatcccaacggaacgccttttcgcatctcctcaataatttctttcagttcatcaaacatcgctcctgtgatgccgatttcctgcaatatctccaacgctccggagatgtcgtcaaatgctatgcatccgacaaacgttttcgtctgctctgcatctatctcaacgcctgcatccgtcaaaatctttgcaacgagtgctattttgtcatgctcaatcagtatgcagagtaatctataaaaccgtttatctcgaattacctctttgagtttccttttgaggattctccggtttatggattcaaagaaatggtgaacatccatcttgagaacaaagaatttctttccgtcgtaggaatcaagccattttctcatgtacttctttccgtaatgaacacccctgcccggaatgctcccgcatgaaaattcatacaatccattcatcacaattggtttgaactgacctattgcacaatgatgaataacctgctcatatttgtaatgcggtttcaatatacggcgtgttttcttgctgctgctctcgttgatgatgctcggtttgtgatagtccggaatgaacaactcctctgtcaacatctttttcaagagttctgtgtgttcatcgaggttctctaatacctcccgcacatcattcctgttctttttctttttggatgcatttgtaaaacgctgttttatgtagtcgtcttgcaacattggttcatataggttgttgtaacttctcatatagtattttcttatctcctatcggtttttgtgctgatgcttactcaaccgaccctatatccggaatgattttcgccttgtggcgtgggatataggctgcatttgattaaacgctccgatatgagaagaaattggacgcaccgatgttccagttcgcattgcccgcagaattgttcaaattcaagtaatccgcaccgcagttctcgccattgttacagttaccgccgacaagggcgaccgcagggagcaggaacaccgcccgacaccgcaccctatatccctatattcatttttctaaaaacgaccacaccgcctagcggcgggaatagcggaggcgttccccctccgttcctccccctgctgcttacgcagcgataggctgttctaagaaaacggacgcaccgaagccccagatcgcaacgcccgcagaataggccaaatacaagtaatccgcaccgcagctcccgccattgctacagctaccgccgacaagggcgaccgcagttattccggcgttccaccaaaaatagtcacatgtgtatgtgctactgctgccacctattgaattgacaatgcgtccgaatctgcttgacttcgttcctttctgccaaccgttgccggatgatgcgaatgtgattccgaccttttcaaagtcctttccggtcagattgtatggaggtgtcattttcgcaagaatttctcctccgaccatcaacagaccgttgattctatcccaacggttgccccaccatttttcaatgtagaacactttgacctcatgggtcgtgtccttataaccgaaaaactgtcctttgtttgtcaatgttccggtcgcaaggtgtccgtagttctgtgatgcgtcgttcacatatccggatgtctgcccctgtccgaacgctgtctgtgaattgtctgtctttgacataatcttgagcatacaatccaacaggtttcttttgctccatgagccgatgttccaaccgttgccgttcgcttttgctcttgtaatttctgtcgatgcgtttgtattgtacatgagcgtctgccctgcaagagaacggatgcgtgttccgtcgtatgaaccgccgaacatcggataatagagtttatccgcatgtgagccgtcctctcttacatacgcatcgtcgttgtacgattcatcatactggacatttgaaataatcatgtactcatagtttccgatttcaaactgtgagagccaaattttgcccttgtcaccgctgccatcgaaaacactcattgcatttcctccgtatgccgtgtttgcgacatcggatgccgttgttccgtccgctttctttgtgtggtcgttcgggtcaagtttataatcttctgtaccgtcatatctgaccattgccggatagttgttctttacaaaaaagacatctccccagtctccgaaatcaaatgctccggttgaatagttcatcgcagcaggtgtcattcccgcagcatcgaaaaggtatgtgcagcgtgtcgccggattgctgtcatttttattgattttcagtccgtaacgctttactccctttgctcttacatcctccccgactgctgccagtattgcgtttgtattcgcataggtgcggtcgagtgtttctttgtctgctacttttacaattacgtctccgcttgccatttgttaagcctcccttacaacaatatttccgtcggtcattccaatctcacacgctttccctgtgacagaatcaatcacgacattcattccggcagctatgccgtcacacgcctttgctgcctgttctgctttgctcgctgctgattccgctttcttgaccgctgcatccactttcgcctctgcctctgtctgcgattctgcatcccttacctgtgacgctaaaatatagccatatcccgccagtctgtaatattctttaccttttttcgatgtcacctttgtcgtttcgaccgtgacctcctcgccataagataccgaaccgcacactctcccgctttcatcgggttcacttctgattctcaacacgccttttgaaatcggtgttactttcttgtaagtcatgctcaagcctcccttatcgtcaaaatcccgtcctcaatcgagagaacgcaggtcttttttgttactgtgtcaaccatagtattgagaccgtccgcaatgccctcacatgcctttgctcctgcggttgcggatgctgctgcatcgcttgccgtctttgctgcactgttcgcactgttggtcgcctctgtcatgttcttgctgaaattgttcacggtgttcatgtacccctgtgtcaattccagtatttcctcataacgtgcattattgacgataatcggcaaatcaaagaatttgtttttaccatctccctgtctgactaaataatgaccggatgtgtcaatttcaactccgacctctctttccttgagaatcagtgtgtcctcaaccgctttccagtctgccgttgttccggtgcatggtctgattgctgccatctgttcaacctcctttgccccgtgattatggaatatatcacacaatcacgtttttgtgttcgtttcgccgtctatttccagtatcgtggaattatactgctaattgtcgggaggtcggcgttcctccgtcgaaatcaacgccctcatttgcccgtctgacctgtggcgttgctccatcaatgaaaatcggtgtcacggttcgcaggtatggtgtttcgccgtcacaatcaagatacatgctcgaatataacgcctcggcacggttgaaatagtcctgcacactctcaaggattttctctgcggatgcaagcagggaattttgaatcgtgtcgtcaatatcctttttgtcctgctcaacctgcttctttgctgcctcaactgccgactgcatctgcgacacttcctgtctgatctgcgtcgccgtgttcagtgttgcctcaagctgctcttgattctgtaacgcatcctctgccctgtctgtggcctctttgcagtcctttgtcgcctgtttggtcgctgtggtcgcatcctcggcgttcttgaccgcctgtgaggtgtcctgctgcctctgtttctcctgttggatgcgggtgttctcattttcctgtcgggtcttttccgctgctgctctttcgctttctgcctttacccttgcattttctgcggtcaccctcgccgattccgcttttttgaccgctgcatccgtgttgtcaatattctcaatatgccccttgattctgttctcaaggtctgtgaactcatttgatgacaggattgcattttcatttctctgcgacttctcaatctccatcgtgaacgatgcagatgtgataatctgtgaatcatcgcttgtccggatttcgatgtcgcaatacgccgttccggaggctgcaagtgcttgatttgtcagttcgaccgtcacatccgaaccggaatatgtacatgtgttatacacatgtttcccgtccggttttgtaatattgatgactgttctcgaccccgtcgggattgtgtacggttcaccgttgttgagtaatttcgcaataatgaatcgtgttgccttgtctccctgttttgcagatactaaatatctttttgtatctccggacatttcaagattgatgtacgttatcaatttcgtcaacgctgccatgctctcacctcctctcggtgctgcctcttttattctccctgttcctcaatccagtcattgatgaattttttcagccaatcaatatgactttgtgcctcctcgctcaaaaccgtcatgctgcctttgttgttgtcactggtggtttttccgctgtcggtcatttccgtgtatgtgaaccccaaacgctgcccctgtgctgcatttgtggcgttgaatcctgtgataactcgtctcattctgattcctccattctttcaattattcggttttgttcttcctgcacttcgatttcatccttttccatctcatacagtaacatcatctgatttctcatttgctcattgagcatttcctgctcctctgccgttatatcttctttttccggtatatcagactgttcaatccttgtgtctctgcttcccttttgtcttgtctttacttcccagtaaaattcaagtttcggtgtgccttttactacaaaataaccatctttttcatttgttgattcaacgtataattcacctgctccctttgcggtgagcattacaatatatttcatgtctctctctaccgtcagcaggaaatcatcaccaagatacacatagcattgaccgtcctcgtcaagttttcccgttcccatgtctccgaacgtaggggatgccgtttcatatgcgtacatctcgatgttccgtccgtcatcggtgtgtatgattcgtgttttctcccccatacatccgatagttccatacgcaaatatattattattcgccgtgaatccatatccccatagagtgccaccactttcaccgacaaatatatgtttcccgacatatcccagtaacatggagtaattgagttgtgacaatgtccctattttaaaatcactgttgatgtacaatccggaataaaaattaggcgataatgcaaacacattcccgacattggtgatctcacagtttcctccgatgagcagcgaacctcctgtgattttcagtgctttcgtttctgccgaaccatctgtattgattttaaagtttgagttcgctgtcactgctccattcaaacttattttcgaggcttttatcgacactctttccgctgactggtttatctttgaaataatctcgttacttcctaccttttttgacaccgttgattcgattgcatctgctttcactttgatcgcagcgttcatctcctctgtggtagaatactccgtcagcttctcgtcggtcgctgcgttggcgttcttctctgctgcattggctgcatcctgtgccgtcttattcgctgcggtgatcttctctgtcacggaggtctttgtctcataggtctttgacacccctaaattgatttcatcggctttcatgtcgattgccgatttcatctcctctgtggtagaatactccgtcagcttctcgtcggtcgctgcgttggcgttcttctctgctgctgcaactttctccgatacaatcttttttgtttcatacacctgtgaaacgcttaaactgatctcgtcttttgctgcggtgatatgtgattcaacatcgctttttgtgtaatatccatctttcaacaccttttttgtgttgctgttggcgatggaaattgcctcctccgtagctgctgccgttgcttctttttgaatatccgcaaatgtttttcgtgcgtttgaaatctcaaccgtattttttttcggtgtttccggatattccgtaattttgacaattctctgtttttcttttgttcgggttttctttgacacaagtgtgaccgtgtctccgattccgtatgaaagaatgtctttgtactcctctgacgctttcgcaaggtcaacaacctccgcagtatatgccttgtacggtcgtgacatttcctcaatctttgccgtcgcatcctcaatcagacttgtggtgttggtgtatcgttcatctttccacacatacgccttgactttggaactatactgaaaattgtcgatgtaatcttttccggtcaaccattccggcgtgatgccgtctttgccaatcgggtagattcttgtataaaaatcataagtgtcggatttcaaagatatttttcggaggtttatcccctctatgaaatagcaacctttatcactgcctattctttcgtaaatattcaccgttttattgattgaatcaatgatacattcacacctatatgttgataggcacttttgcaggacatcccacgccgtgatgttctcctgctcgtcaatggttcttttctttgtgaccgtgcatgttccaacatgccaccccgtaccctcgaacgcaaactcaagacatgctctgattgtctgttcatccgattcaaagccatacgggaacgctgtcccctccaactcctcgacattgagaacgacagtgtatttgttgaattgttctcccttttcaactgcttttatgacaaattcatctgtttttgtgcgtatataatactcttcttgcaataaaccaaccaacgctcccgacgcaggatatgcaaatgtcatttccttgtcaccggaatccagtgtcgtggtgattgctctgtttttgaatccggacagtgttccgattcttttctttctgtcattaaaaatttgcaacgctctcacctcctaaatccacattggagtgtacttgattgtcactcttgcgtttgtatcagagaatgtgagtgctgtttctcccgactttagcactggaaacgcccataaatccactttgtcaaatgcgttcgccccgtcgattgtcacaagtccggtttttgcgtcaatcacaaccttttttcctgctgcaagactttccacgatgatgtcatcgtctcccaaaccgccgattgtgtagttcgtcaaggctttctttgcatatacctctacaacgcacggagcgtcccttgtgcctactttatagaacgacgcagaggttttcccatcaaacacgattgagaggtcatcatcaacaaaaaagccgtcaaattcgatattcacaacgtatcgttctttcacattctttttctcataatcattcgatgtgatgaatccgatatacgttcctttgtagccgtcaagttccagcttgcaagcctttgtgaaattcatcataaactctgacgctgcccgaatgatattgtttctattcttgcccttgaaataaattgaaagtttcaaatgccccatctgaacctctgtctcaaattccgtcggcaatgctgctcccgtcagccattcataactattcgaaaatgatggaggctgcacatcggcggtcaactgttttgcatcatattttctgatgtctataccatttattttcatcgccctgttttacctcccttttcttctatccgtaaccatttgtgcatcaacttttgacacggttctgcttgcaacctcgtctccgtcgatataggtgtgattcgttacataaacaatatttgatttttgaacggcatccagtttcttgtcgaggatgttgttcaatttgttgtaaaattccgcaagtggcaagattgcctcgtctcctgcttcgcctcccaccatgaggttgttaccgttgattccgaacactgtcgggttcgtcatgatacctccggatttgtaccaactgattccaaaatgaggtacagacggtgggctaattgaaaaacttccactaatcgaaatatgcggtaatttcaatcgtggcaatgaccaactaaaattgaacgcactttttattcttcctaatgcgtttgaaaccgttgactttgcactttccattttcgaagaaaatgcagactttatcccatccagtatggaggatgcggttgacttcgcactggataattttgacgaaaacgctgactttatgctgtcgagttttcctccggtcaatgtgttcgcccgtgacatgagagagttcattgtgtctttcacacccgtaaaagatgcagacacaattcccttgatgccgcctccggcgttcgtgtacgccgttttcatattgttcaattttgtcgaaacatttgatttcgccgtctccatgagagaggtcgctttatctttgatattggtaaaatctgacgaccactttgtcttaatctccgaaacctttgttgagaatccggtcttgatctcattcagtttgttggttgcattatttttccattcggtcatttttgtcgtgaccgtggttttcatgttctcccaaccggacgacacattcgttttaatttccgaaactttcgtcgagaatccggtcttaatctcattcagcttgttggttgcattatttttccattcggtcatttttgtcgtgaccgtggttttcatgttctcccaaccggacgacacattttccttgatgctcgagactttttcagaaaatccagttttgatttcctgtaatttgtttgacgcattggttttccattcggtcatttttgtcgtgaccgtggttttcatattctcccaaccgtctgaaaccttttccttgatctcggatgctttttcggaaaattttgtttttatttcggagagttttcctccggacaaatcatcaacaaatgtgaatcctgcggaataatatcctttgattccctcccatccggcagcgacaacgcccttgataccgcctccgttttcttcataggcagttttcatgtttcccagtttttcctttgccgtttcggtcgctgctgacatgaaattgtgaacggtgtcctttacgctgctgaatacctttgttgcctcttgtccgatggtactattttttatattatcgccgatctctttgaccttttccgtgaccgcttcttttgctttcgtgaacgctcccgtgatggtctctttaattgcctcaaatttttctttgatgttactccacaattcggacagtttttctttgacggtgtcccagtttttgtatagggcgacacccgctgcaatcagtcctccaatcagtgccacaatcatgatgatcggacacagcttcatagctgcatttaatgcggtctgtgcagcggtcatccctccggttgttgctgtggctgctgttgttgctgccgtatgtgctgccgtggctgctgttcctgccgtatctgctgccgttcccgctgccgtggctgctgtctttgccgtaatctttgcgattatctttgcagctccggacacaaatttctgtccggtcgttatcgtgctagagattccctttgctacttttccaaatccgattgacaacggaccgatagcagcaaccacaagacccaccttgaggattgtttgctgttggctctcgtctaaatgtccgaaccattcacttaataggtgtactttttcggtaaattcttttactattggtgcagccgatgacatcactgtttgtccgaactgtaatgtcgtatttttcaactcgtttaatgcgatttttatatcatacgatgttgttttcattttgctaaacgccgtatctgtcgcacctgttgaatttctcatttcttgtaaagttccgttgaaagaatctgctccatctcctaagagaatcaatcctgcttttgctgcctcggacgatgaaaacatatctcccatagacagattttgttcttttgctgcatcattgataatgcttaatacatccgcaaggcttgaaccgcttgacattaattccccgaaagattttcccgtcttttctctcaatattgtatctgttgtacttcctgtttttccaagttcgttcaacattgagttcatgtatgtcgttgattctgctgttgcaacaccgttcgccgtcattattgcatagcctgtgcataactggtctagtgccacgctgttggcatttgccgtcggaataacttttcccatcgctgacgataattcagcaacggttgtttttcctaaattttgtgtctgtatcaacatatctgacacattcgtcacttcggtcgcctctaaaccataagcgttgagaatagtcgtcaatacatccaatgtattcccggattctgcaaatcccgctgttgctaattttgttgactctcttacgaaatttacagcatcacccgttttttgtcctgcacttatcgcattatatacattgtctgctatatctcccgctgcaattcctgtttcatttgataaactcagaattgcatctgacatgtcatcaacagacattacgctgtcatccataattgttgatacttttgcaatatcatcctcaaagtcaatcgccattttccccgatgccgttgcaaaagtcgtcagtcccgttgacacgactgacatttttttcccgaaactctccatcttttcgcccgctgtctcacaagcctttgcgaatgtttcgagtttatgattctttaattgttcgtttacatcttttagttctgcctccatattcatgagggcggtctttgatttttctgtctttgctgtctgatttgcaagagcggtctccgtctttccgattgccgtttcatttgccttgtattcctgttccagtttgtcaagttcctctttcaaggctttcgactgctcggagttttttccggtctcctctgtcgattttgcataggcatctttcgcagcgtcgatctttgacttgagttcctcctgctttgttttctgttctgacagtttctttgtcaacttttcctgctgctcactgttcaactgcacgatgcctttctgcaccgtgattttttgagtgagcgattcggcttttgccttgaggctgtctgtttctgaaccgaacaactttgctttcgttgctgccgtcgtatattccgcagacaggactttcatttgcgctgctgccgatttcatttgtgactggtaatcacttgaatttgcagaaattttgacgcttgtataagccattcggtcgcctcctctcctactgattttcgttgattgtgtctaattcaaaacgcaagtattccaacaacgtgacaatgttttctttcatgcactgactgtatgagtttttcaatagccgaatcgcaatttttacaacacggtcaacaatttccccgcagactttccattgattttcctccggttcttccggctcgtcctcataaccgttttcacggtcaaattcgtcaaatacggacttttctttttctacctgttcaacctcgacaatgttcaatagtttctccgcaataatgttctgcatcacaaaatgaactgtcttgattgccgttagaaaatcaatcgcatcaatctccccgatttctgcaagtgtcaattcgttcccgaacaactcctgcattatctttgtgttgaaaaacatcactccggaaatcttttccgtgtgatttttttccatgagactgatatattttttgtactgctccaccgttatggagttgataaagtatcttttcccgctgcaagtgacctctatttccggcatcacttgccattctgaaaatttttctctatcttctccatgcgttttgtgagttcttccccgattcctgcatcaatgaactggaactcaagaatcaaacctgctgcatccagtccggtctccggattctttaattcttcgactgtgaactgatctccgtatgctttgcagataaacagtgccattatctcgatgtcctgtcttgtgtatctcggatgtgcgtccgtctgctctgcaatatcgaggtactccgtgtatgtatcaatcgacattttcggcattgtgaactctttgttgctgatgatgatttttctattcatggtttatcctcctgttatatcccctgttacgctgctgcgtcgtccttttcctgcacctttgaaaaccaatttttgattgcatccgctgcctttgtgttctctttcacaaggtttgattcatcgactgaaatttcatacgcattatcaagatttctctcatagaatgaacccttgatgctctttgtcgtcggagacagtttgccctcttttgtgcttgcctcctcgctgattccctctgcaaattttcctgcgtataaccatttaaaatcatactttccgttcagttttctctcacgccatccgatagcgacctccggtgctttgtcgtcggctgtcttgacaaggaaaccgttctcgtataactgaccgaataaaatctgtctgtcctgcggtgcaagtgcattgacctcaagttcaacctctgttccctcgtatgagttgatgacctcctctgttccgtcatcggagtaaatcttttcagatgtccatttttcatcaactttcgccttgattgctcttgccagtttcaccggagttcctgcaacatatcccgtcgcatcgttctgtgtgatttttgcgatgtagaaatctctacaaccgcatgttctacttctgacaatctgctgcactgtttcgcttacctgtgttactgtttcgctcatgtctattcctccatttcataaaattttgaaaacctttgtgctttcatatagattccgtcctccggtttggaatcgtcgccgttcctgccctcaaacgagaacccattctttttcatgagtgtcttgatttccctcgcaagttcaacctcgtcactctccgaaaaaatagtgacctgcaatgacagcgtcactccctccgcatcatcgtccgaaaagttctcgtcgtcctctcccaaatcccacaaggtcacatgtctgtcgtgaatgttcttgtcataccatccttgcatgacaatgattcccccgtctgaaatctgttgcaacgcatccgatgcgtcttttatgatgtccggactgttcacgctatcacctcatttcaatgtgttgtctaaataggattgatactcctgttctgcgattttttgcagttccgcatctgcctcacgccctgtcgcatagataaactcttgaggtgggcggtatattgttccccagttaatgaatttcacataaaaatgttcgctattatcggacttttcccatccgacattcgctgacgctccggtgtctttcaccttgactgctcccagtggaacgctgtccgctgcatgtgatgtgaccgatgattttgaaccgaatcctcgaccgctcaactttatatctgccgactttggaatctttcccgacataatgcgtttcacgacgggttcaccctgctcgacaatctttttattgactgctcggatgtcctcgtcgcttgctgcatcctcaaacgctttcatgagttcctgcaacccttgaaattccatttcaattttcatcgcatccctccggtgtcagattatgacactacgcccccgctctgcatttcaactgatatttcctgtcgtctgtaaacattggagacgcatcatatatcttgaactcaacgcctttgtacaccgcatagaactctttcaaattcagtcggatttcttccatcttgtcgcacgttcgtgtctcaaaaacgattgtgttttcaagtccggtctgcaaggctgtgtatttctcatttgttcccaaactcttggcctcgcaccaacaggaataaaactctgtttcctcctgctgccgtctgccatcaacaacgctcgacaccttgcgaattatcttgattctgcctgtcattgtgctgcacctccgtatatttctttcaaaagcattgaggaggcagcagaggcaagcagtttcgtgtcgctccggtatttgtcacggttgtcgtaaagttctttcacggatataaatgcaagcagtttttgacggcttgtgaggctgtactggtcgaaattcggaatcagttccgtcatttcctgcatggtcacatcaaacatcaattcaaggatttccatgtcgtcgtcatagtcgatgtgacaatataccttgcatgtggtaatcagacctgctctgtatttctctttttcttcatccgtcatgtttctcacctgctttcaatagcaggacggattcaccgccctgctgccttgttacccgttgacaacctctgtgatctcgcctttgatgactgcatccttgtcaactgcctgtacatcgaaacggtcacgaaccttgagacctgtcatgtccttatcccataaccccgcacctttgtcattgaggtcgattgtcagaacatttctgtcgaaaagtgtgatagcctcttttaagtcaccacagaaaacaggatgcttgtacccgtcgattgtgtgaccatcgctgttcataatcggtgtggatttgagtgttttctttgacagcttcacgattctgtattctccaaaaagcatctttccctttgtctgctgtgtcgggtctttctgcaaaatatagtttccgtccttgtcctttaacttgtcgaggtagttgaaaccgctctgattcgtgatgacgattgaggattctgcaatcgcagggtctaactgctcattgaaaatgtccttgaggctgtcgaggttctccactgtgacctcttttccctttgtcatttcattgagtaccttgagaatcattgcgttacgggttgcctttgtctttttcgcaatccatttgttgatgtacgccatgatattggctgcggtgtcctcaagcagctctgcggtcatcttgaggattccaccttttttctttaccttgtactcaatcggtaaaaattccggctcgtccatctccggaaaatccgcagcctcgtccacgttgtcaaacggggttgattctgcatcgacctcaatgtttcgtgttccggtttttgtcacaaccccctcgacattgacatactgctcaaggttatcggatgaacgacgcaattcgatgatgtctgttctgatgtcctccggaatggtcacgccgattccgacctctccctcacttcctgcggttgtgtcggatgtgagggcgttcttgtacacctcaacatctgcctcgtctgcctctctgtgcaggaatccggctttgacgatgttgacgaacgctttcacaaggttctttttatcaacctttttctccccgccaacctgttttgcagtgcctttgttgaccttatccttgatgccgtcctgctcgtcctcgtccagatcataaaggaggtcgaatctgttctgtaactctttgagttcctcctttgctgcctttgccttgtcgagttttccgtcgtttacaaggctcttgacttcgtttttcttgtcattgatctgtttcagtaacttctgtaattccttattcatgactttctgtcctccatttcttacataccgtaaaggtataaatcgtcgagaatctcccgcttttctgcctcaattctctgttcctctgcctgtgctgctgcattactcctcttttccaattctgcaagcactgcatcgacaatgttctccgtttcagttcccttgagtgtctccggaatattgttgtatttctcaaaatagtcggatgcacacgctgcgactgctgccttttcttcgatttcaacattgaaatactgctgcatcttcttgctgtcgaaccatgtctcattgctcatgaggctctgaatcttgtctcttgtgacaccctcctgcacgtgctccatgtaaacgtcgaggattgaatcctcgcagagattcaactgctttattactgccttgaaatcatctgcgttgccgtatgccatgcacaacggtttgtgaatcatcgcctgtgcccctgttgcaaaatgcagttcatcgcaagcgaacatgatgactgatgcgatggatgcagccattccgtcaacatagccgactttgtgtccgtcgtatcgttttaactggttatagattgccagccccgcaaatacgtctccacctccggaattgaaataaatatcaatatcctcatagccgtctaactgattgagaaaatctgcgatgtcctgcgggcatctgtcctcctcgtaccacatggattcccatgtcgctgatacaatgtcgccgtagaaatacaaggaacatctgctctgctcctcgtcctgctccaaatccaaatagccgacattttcaatctttccgctgcgtttatttttctttgtgaaatcaaaacgtcctttctttggcatgattattcacctccctcctgttcgtcctcgtcctctacctcgtcggtttcgtccggttctgttgctgcgtccggctgctctgtgtccggctctgttttttcttccggctgctccggttctttggtttcatccggttcggattcacctttcaaatatgctgctcccgccatcgtcagcggtacgatgctgccatttgcaagcagaacatcgcctccctccgcatcttccatgtcgagtttccgtctcgcctcgtttggtttgataatcattccaccgacaccgtttctcaaatattccatctgcgtttttgaatcggtgcggaacaacactttttcattgaatttgtagtaatatccatcgtctgaatcgtcatccggcagcatcttgaaattgatttcctcctcatactgcttgatgatgaacagttctgtgtcgacgtaaaatgataactgctgcatctcgctgttactgtatgacgactttgaatagtcgttgatttgattcggttttaccccgaacgctccggcgatttgcagggcgttatattttttcagttcaaagaactgtgaatctgtcagtttgatgtcgagaggtgtgagtttcatccccaacggaacgggcaggatttttcctgtattctttgccccgctgccgaactcctcaaacgacttgacgagtgctgttttcgctttttcgttcagttctccggtatattcaagagttgcctttgctgtcagaccgctctcatataagttgttcatgaacgcctgtgattcggatgcacctgcaaccgtatctctcaatatctgctgcactggtagtcctgtgattccgtcaaaactgaatgatgttttgaagtgcatgacctcgtctgtgctgaacacatattgacgaccggatgtcgggtctgtgtagacgtaccacaaacgccccactcctgcgaatattcctgcatcgtcaacgactatctgcacacaatttgactgcatgacccacaaatcaacgattttgatttcaccgccgtatttcttgcggtcaaacttctttctcatgtacacataggcgtttccgtaatggttgcggttgatttcaaccgtgttccaaaatgtcgttggtgtcataaacggattcggtctttttgagagcaactttgaggcgtccgttgcctctgcctcaatgattcccttgtccgttttctgataatatttgataggcattttcgcaagggtctccgacagcatcttgagacatgtgaaatatgtgacctctgatgtcggtttcccttttcttttcagtcctatcctctcaaggaacgacggtgagttcagtgtcacaacgcctccgctgtcctgtggttctcctctccaccaatttgaaattttcactcctaatctctgaaacggattcatttatttctcaccgcctttcttcatgtatttttcaaattgctcaagccattcattgacagtttcattcacatccggacggtattcctctttcattgcgtgtttccatgcgtcgatgatagcgtcaatcgggtctattctctctgtcgtgatgtctttgtcaatttttatttcgccgtagttgtttgagatggtctttgcgtttgcgatagaccacacaagcaagccatcggcaggaacaacaatcttgtttccctcttttccgacctctattccctcgatttccacgttgcccgccaaaatctcaagtctgaaatcgaccgtcgcatcgttcaactctttcgctgtctgtgtaacagagattgaatcgaatcccaacgcctcaaggtctgacaggaacgccgatgcgttgtgcgggtcataacatatcaactgcggtttgaggtcgtattctttcaccaaatcctcaagatatttgatgatgtatttgtaatctgtctttattcctcccagtgtctcggtcactgtcacaagacccttttcaatccatacgtcataaggtactttgtcggtcttgatgtgttcatccacccttgaggacggaatgaacgaatgtgtgtgtacaaaatatttctttactccgtcaaccatgaacggaatcacgattgcgattgatgtcaagtcgcctccggatgacaggtcgaccccgacataacattttgaccctctgaaatccttgagtgatttcagagcggcacatgctttccattttgcgatgtccttgatatacagtgaatttgaccactgcatccacatattcaactgctttacgaggaaatctctcaaatcctccccgcccatatcacgggcggtatgtgcaatcggtatgaggttttcaagagcatccatgtcaaattcaagaattgggtttgcttttatccagttctccggaacatatctgtcgtcatgttcgtccatctgtgcgatatatacgaactgactgtcgttttcaaaaacgccctttaacagattgcagcaatattcatacaatttatagcagggtgatttgaggtcgaaccctgctgtcgtgatgaccgaaatcaacgctgacttgagtttcttgatacctccctcaagcagcttgtacatctgattcgtcttgtgtgcgtgatactcgtcgacaattcccaaatatgcacggtgtccgtcaagtgactttgtatcaccggacagcgctttgatttctgaatgcgtcaacagacagtcaatcgtgtggttgtggtcatgcactttgaaccattccgacaaatcctcgtccgaattgatgaattttgcgacctcgtcaaaaacaatgttcgcttggtcttgcttggtagccgtacaaaagatttttccgtacttgtacccgtcaaaattcccgtaataacatgccaaaataccgttgatgaacgattttccgttctgtctgcctaattgcacataggacgttctgaaccgtctgtatgattttccctttgttctccacccgttgagtgaccctaaaataaagcactggaacggatatgcggtcacatgctcgttttcttcgccctctgcaatggtcaattcctctgcaaaattgatgatttcctctgacttttcaacgtcgaaatagtatttgtacggtgctgctttcgatttctcaatgtcgtcgaggtgtctttgacatgcaagtcggacatattctccggctgttatcttgcccgaaacaacatcaagggcgtattgtgtgcagcggtcttgtgtttctcctgctttcgccataccttaatttgcatatttcgcaaatttattctccggcttttgctgctgcggtttcggtacgaccaaacggcagcgtgaggagactgttaatccaaaatccgatgctccctgtctgcactgtttcatgcagcggtcttgaataatcatgagacgctcacgttcaccgttcacgacctgccttgtaccgacctgcacacgttctttttctcccgtgtccggattcgtctttgtctcatataccggaacatcctccatcaatggagttgctctgatttgctgcgtgatttcgatgtactggtcttgtgcaatgagcaatctcgccagtgcatcgcagtcaacattcgcaatcagtttgatttcaagtaattctttcgcaatcttccggaactttttcttttgctccggtgtcaaatatgacggaggtttcactttgttgttcggtgctacaacctcggcgttttttcgtgcctcaatttctgcttttgtgaggtgttttcgcccgttcataacaaccaaatccgtgggttgtctctgccctgccatgtagcaacaaaccccctttccgtcaacatttcagtgattttgtgtcacattctgacacccctttcggatgtacctttctgctgaaattcccgtggggagttttctccaaacaaaagagggggtgcgactagaaatgaatcgcacaaaacttttttatatccccctgcctctcgaaagtggtactcaatcagtgatctcaactgtttctgtgttgctctcatgctcgcttggctctgcttatacagagccgtgattgtattgtgtgttttatgattgagaggtatgaggttgaacggattcaaacgctgctcccagtcgtcctcaagttcaacgatatggtgaacaggattgcatgtgagtagttcatgttcgacatataatgcgtatatatctatgttgtcatagacctcaatgatacgttcccgcatcgcccgccattcctttgatatatagaactccgctgctctctcgtctcgccgtgtgttgttgtatatcatgtgtctcgactgctgctgccgttcacattcctcgcacatcttcatcgactgcggaatcagcttgccacacctgcatgatttcaaaagcatctgtgttctcctctctttcttgattctcctgctttgttatccacaagaggcgggcagttatgcacattactgtgtacacttacccgcatataacaggagggcaaacaggcaagaaaaaagcgactgcatatctgcaatcgctcaactcaactgttcacgctaacatattagcactttcatttcgtcttttgttcacccactttttacccctattttcaccctcatttcaccctgttttcactccgtttctatcattttcaatcgcttttgcaccaaataatttgattgacaggcgttgaatcataaccttgcaccactttttcggtgagttgcgtccgcagcctgtctccctcactatatcctcgtatgttttgcccttgatatataccgcctcaagtgcgtcatacttgtacccctcacctgctgcctctgcatcttcttttagcgatgcaagagcctgtttgagatgctcgaacagaatgaccgtctctgcacggcactctctgaccgattgcagaaacgctctctctgctgatatgttgtatttgcttatgtttggcacttgagaggtctctgacactgcctctttgatgtatcgttccatttcacgatagttttcgagatatagcagggttttgtcaatgactgtctgctccttttcctctttcatgctttctcctcgctttctgctttcgtctcataggcagaccgtgcattttacgccagttatttgtatctcggcgatttgtgcatccttgcgaaccgctcattttcataattgccgtttttacctgctccgctgtgactcccgtttgcatgaccgcctcgacgaactgttctgctgttgtctttgctttgatttccggttttttatattcctttttttctgcgatgcccttattaactgtcgctttatctgctgcctgttcgatcatgtttgagatttctttttctgtctttccggcttttctaaaatgctcaatcacgcttttcacgatgctcataattcccatattatcacgctcctcctttccgtttacgcaaaagggagttgctcgtcaacgccgtccggaatattcatgaatccgtctcctgcatccgtataatctgcattttgtccctgttctcccgctgctttcttactttccgcaaattcctgttcctcaatcacaacatccgtcgtataaacccgctgtccgtctctgtttgtgtatgagcctgtctgaatcctgcctgtgacaacgattttcgttccctgtttcaaatgtttctccgtaaattcgccatttctgccaaatgcaacgcatgagatgaaatctgcggacggttgcccgtcccgctgcccccaacgatcaaccgccagagtgtaacgtgccacgcacatggattcctgcgaactgttctgctgcgtatatctgacattcgggtctcttgtgagcctccccatcaatatgactttattcatttgccgttcccgtcctttctctctgcatcacatactcattttgcatcttctgcaatctgacgagaccttttttgaactcaagattatcgtcattcatgcaaacatcgaatattttctcataatcaacaatgtgcatcttgatgaactctgcctctgctgccgtccggctctcattgatgaacattcccttgactgcctcttttatcatctcgcaatgtgtcttttcctcctctgactgtggcggtgtgctttcgatcatgtggtcataggctttgtcaatcgcccctgcaatcagttctctccaacctttgcccttttccccgattaactggttttcaatgtcctcaaatcggtttccgtgtcctgctgctacgatgcggatgtcctttttgccctttgctgcaatcagaatcaaatcgtcatcgtatgcctccatgtaatagtcaaattttgcatcgaaattctctctcggattgatgatgatttccggctgactgcttccctccgtcttgatgctcactccgatgtatttcgcatccttgattttcgcattgataaattctgcctttaatgtgcttttgttcatgctgctcctccattcactaatctgttgagtaactgttcatacatggtcttgtatgtgtctctttctgtctgcaatcggattgtctcctctgatgatgctgtgttttccggctttacatttgccttttctttcaattcctgctccatcgcttgaatcttgttgcgatagagttcgatttcctcctgctgattcttgattgtctcattgtatttctttgatgttttcatactgctgtcaagctgcaaggaaatcatgagagcgatgtcgatgttctccatctctttgtctgtacactccccgatatacgttccgatgcgttctgttgataccgaatagacctgctcacacaaaacggtgcttggtctgcccgtcgatctcactgtcacatgcgtcgggagatctgtttttggctgtgtggtcatatatacaatttcaacgacattgctgttctcattgttcttgttattgctcacaatgaccgccggacggtcggagtgctgctcgctcccgctatacgatgcccccctctgctgatatagaacatttcgcctctcttgatgttatccatcacaattcctccttttttatcactctatacagtcttttcgccttgatatattccttgtattcttcatcgctcatcatcacaatatttgttttatcttttatatcttccgcaaactgttctttgctttttccgtacacatccgcaccaaaaatccgcagatgttcaactaaagtctttcctctgatgattccctctctgataatttttccgttctccgtctctgtgttctcaaatcttttcaatgtgtaattcagtgagaactccattgctgccaaaatcgggtcttttatctctgtcattctacgcctcaccgtctttcatgagtttggttgccatgatgcaatatccgtcctcaattccggtgtagtcctcaagaatatacgtcacaagcaccttgaccatgcgtccggtgttcttcccgtctgcaaattccatcatttcaagaatgtcgccttttttatagcctctgtcattcttccggagttcaaatgttttgattccgtttgccacatcatcgaaataaggctttgcaaggcgtatctgatgcactttttgtccggtctcctgtgtatctgacgggaggctctgcatcttctcctcctgctccatctcacggagttttttctttgtctcacggtcgattgcatcctgctcctctgaatatctctgctcgtcggtcttgtacgcctccgcacggttgttgtactggtcgcatgaggtacatgttccggtcttgacgttgcatgtctcatattcggtgcaggagtagcaaatggatgtgattccctccggatgcggtgtctcgtaatcgtcgcccgctcttacttccggaggattcatgctgctttctgccgtgtcggattctggcacctgctgccccgctgctttcgcctctttcatgtctttcacttctttgtgtgtcagttctccggtctctgcgaatttccccagtgcctcacgctgctcgtcctctgtcatcccgctcaattcataagctgcggagaatgtgaggcgttctttcttgagttcttctctccattccggaatcagattattgttgaccgcctcaatctgtgcaatctttgttttgctcatgtgcagcatcgaggaaatcacatctctcaaccgtccggattgcaggtcatatcccttgattttcttccctgctgctttcatacgctcaagagatgccttgaggcgtgtttcctcctcgatcatgtcggaaatggtctttgtacggtatgcgttggcgatgatgatttcgacctgctcctcgtcatcgtcctgcggtgtagtcaatttactggttgccaattcaaagtctttatatccctttgatacgaggtacttgagagcctcccaacgtctttcacctgcgacgattctgtattcgcctttttcgcacggtgcatatacgagttcaaggttctgtttcaaaccggacaggaggatgtctcctgccagttcttcgatgtccttgacactgtaaaaattcatggtattacggtacatcttgaaaattgaaatgtcctttgtccggaatctcgctctcggagattcgtcaattcctgctttgctgtttttgttaagtgcgtctttgacgctgaatcctgctgccatctgttcaccctcctgctgttactctgtgagtttctgtttttttgtctcggtacgttcgacgttgatttcgcccttgctattctgtgaaatagaggctttcacgcctccacggaggttcaatgtgacctttgccagtcctccggtgtaaatctcctcgactgctgccttgagaatcttcacaatgccctctccgcatctcttgtccggtgctgctgcctctccgaacaatgcagcgacgttctgcatcgccttttctttccgctgtttctctttctgatattcaaccgcatccggacaattacatgtcatggttgcctgttcctctgcctgtgctgttgtcagttcttcgtcgctctcgatctgcgtcatctgaccgcagaatctgcactttgctgttttcacgatgtttcccatgcttattcctccttttctttcttctcaagttcctcttttcccaatcttatgaaatcacgcaaatcctccaatcttctgttatatgtttcaagtgcttttttgcgttgtcatattgccatttcagaaaagcatgtcgttctgttccgtctttttctttcaattccttttccgctttttcgacggctttttccaaatctcccgaatatttgaatgttgtaccacttttcttgtgtaccgctctcattcccgccatgccttacccctccatttccttgagtaactcatgcacaacgcatctgtaatcttgagacacgattccacgctttgaaaatttcgggagtggcatcattgccgttgttgacttctctgcaacaatggaacggcgaaccggagtgacgaacatgtcgaatcctgaatctgatttcaaccattcctcaacctcaagagaggtcttatttttctgtcgcattgtcatgagtgctttgattctcaaatccggattgatgtccctcaaatcctcgatctgctcctcaaggttctgcaatgcctcaatttcatatcctccaacctttacaggtgcaatgattaactctgccgatatgaggatattgatgactaccatgtcaagcaaacgaccacaatcgcaaatgcaataatcgtatgcgtcagatacctcctgcaatgcctcacgcaatcttgtgacttgattgtcctctgacttgagcagcaaattcatgtccgtctgcatgagatagccattcgccggaataatgtcaacgtgtgaatattccgtcgggcgaatcagatcacccgttttgtatgtaccgccgacacattcatgtttctcaagcagctcgctcattccgattccgtccggttcaaatactccgaatgtctttgatgtatcgccctgcgggtctccgtccaacacaagcactctctttccctgctcctcgcccaacatgtaggcgattgaatcggatgtcgtcgtttttccgattcctccctttggtgacatgactgcaataattctcatgttgattcctcctgttattgtcctgttattttatttttccgtccttgaggatgctgttgtttgggatgctcatgctcaaatttctctccctgtgtgccaaatctgacaaattcagatattcctcaatgaccttgattgcctcctctgctgaatagcaggttgcaacaaaatgtccggctgctgccatgtccgcaaggaactctttctgtgtgtcctgctgtctgttgttgccgaatttcatctcgacgagcaatccgcagtatgagcctttcgggtatgggagttgcaagtcagaaacgcccgccttgacacccatctgtttgaatttcactgcctctgctctgttcctgctgcctccattcggcacatggaacaaccactttaattccggataacggttcatgttccatcccgcccatgacacgacgttgatttgctccgtgtcctcacttcgtttcgcatatctcatgttcatttgctttcgcctcctctttgcatatttcgtaatattcgcagaacagacacacatgtttgcaatccttgaccttgagcatgtgtctgattctctcaatgatgtctcctgccctcactttccgaccacctcctcaatctctttcatcctctgcatgattgcactgttgtacgaatacacatacacgccgttgctccacaaatgttcccttgcacctttttcaccgtagttgtacgctgcaagtgcatcctgcaccgtgccgtatttcttgagcaggtatgagaggaaatcaatcccgaccctcacattttgatacgggttcatgaggtcggtgcatcctaacctctgcattcggtcagtgtgccatttctcatatatctgcatatatccctttgactgcccgctgtctccgaccttgtcaaattcatatccggattcatgctcaatgagtgccaacacaagggcatacggaacgtcgttttgcttgcacaggcatcttgtgtatatctgcattttctccggaaaatagcctttatctgcatactgctccggcaggtcataatatacgaacccctcaagatcacaactgccccagtcctcggacatggtgtcaaaaaccttgtatttgctttcgatctcctctgccgtctgcacgattgtttccggattctgcaccgtttccgcatgtgttgtctcctcctgtgttgtctcctgctgcctctcctcgacctgctccggctttttgctgccgaacgctgccacgcacaacgctgtcacaactcctgcgaccacgatcacacgaaacgcattacgtcgccttgctcgtcttgcccgtcttttccgtcttttcaccttgtagcctccttttcctcattcgtgcatgtatgtaaaacatgcaattaaaatcgttgtagtacacgtttgcgttcgtgaaatccatgtccggataccactttttcaaaatctccggaattgaatccctgtctttgaccatcccatcaacaaatgagcctatttttttatagctgcctcctgctgccggacgcttggagtgtacgaccttgattcgtgggtctctcaatccctgtgaactgttccatcttttttccgacggaacacggttcttttcttcgacgatatagttcgccatgccggacagaccattttcatccgtctgcaacctgcgaatttcattcctgcttgactgtttccaacaggattcaaccgtctccatgtccaacgcaccgtccatgacaatgtgatgatgccatctgatttccgcatccggattgtatgcggtcacatagacatattttgcgttcgggagacccctctttttcctctgatagttgatgcgtcggatgtacttttgcacattcttgattgctgcatccacatccccgtccggcgggaggtgtgcgtcatcataggtcaatgtcatccaaatatcacggtcgctgaaattctcattgattaacctctcaacgtatttccgtgcgttcttgtcattcagattcttttgagccttgttattgtctttcttgatagttctcccctccggaggtacttcatccatactccggaactgtgggtatatctcaatctcaaactgatctcctgcggttatctctttcaaggcatatacaactttctttctgtgttggaacaggttctcaatgaaccattcgtgcatatcctccaacgctttgttatatgctgcctcataatcatacgggatgaactgcatccctttctttcttgccatctgacacatgcctcctatataggttttcgtagacttgttattatctattacgaggacgcccaaacctccgaaaaccctgtattttcacgacctttccggtcgttttcgagttgctttttcgtgtcagatttgctataatattttttagtgatagcgactgacacaatcagtcaaatcaaggacgaccactgcaatggttgtcctttttcttttgttctcatgctcctgcttatttgtttgaatatttcaactgttttcttcatttccttatacttccgtcatagtcctcgaacctcggcgttttccaaaacacaaaattattacaccacctttgaagctttctatatatcgggtctgcgtgtttcttgtcatatatcattggatatggtatgaactccaacgatctgcagaactgtattctttcaatgtcttgttcgatggttgtgtcgaaattgcacaagatgtaaactgtcaccctccctctgtttttgttgtaccctgtcatttccttgaacatcttcatttttttctcaacgatgtccttgtccgtgtacctgtcatatgctatgtgtatcgcttcgagttttatctgtttcaacaattcaatgtttttctcattcatgagcctaacatctaacccttgattgaaatttactcttgctttgctgtcttttaactgctgcaataattccatatgctccggacacgccagtgtgttagggtcgcataggacaatgttcttttgtcctttccaaaattccgacaggtcagcaacctttcgagatcttctcccctctttgcatccaacatgacaaaattcgcatcctctcggacatcctcttgttaaaaaaccgaacgctttgtcatgtgttagtcttggatatatggaatagtccggatatatgtgttcgacttccggagggagttctttgtctcgctcctttatgtaacgctccctcccctccgtcagttcgatacaatatccgctcccgcctctgattacttcatctgcatccacaaaatacggataatcttctgtaaatccaaaaacctttgacatatatactctgtccatatgaccgctgaaaagtggttcataccactcaacagtgtccccgtgctgtttgtgccatgcagccaatttcatgagcggaatattcgggaaattgtgaccgtccacatctatcaatcctattctcatacggctgcaaccgcttctttctgctcccatctgcgacgctcctctgcttttcctgctgccttaccctcggcatacgcagacatcaccatgatggtcattgacttcccctcaaggtcgtcgatattcataaatttttctgccatgctctcgatcactgcttttttctcgtttcttgtcatttctcaacacctcctcggattcgctcaatctctttttctatgttctttccggaataatctgcaagcagtttttccgaaatgtgatacgtccaaattgaggacatctgcaccgccgttcctatcgggagttttccctgctgcattgctaccctcacgaattgcggtgacacattgaggattgctgctgcctctgtcggcaatattcgtcctatatccatcttgattcctcctgttggtggttctctcggtcttttcatcccgtccaccccttttccggcattgtctaccgtgttgatgcttttcacattaaaaatcatcgaaaacctgttgaccaaccacgcactttctagcaggtgcgaccgctaccatgtttcccacggtatcgctgacgttgtctttcggcttgccatcgtcagagtgtcggttgccatccggacactgacggggcgactgctgccccgtttcggcattttattttcttgtcctgtcgcatctcctgccatataataaatgtgcgaccattttcaaacgacaggaggtgaattgttgtgaacgattatcaaaagttgtttaacgatattagcaatcagaacatcaaggctgctgaactcgaacgtcgtaaaaaagaccgttatcaaaaccgtttcaattattacaatagtgttgttgcaaccctcgccttgattctttcgattatcggtataatcttagaactaaactgataattgacaggactatcgctaatgttgagcagattgcgggcatccatttaatgattttcgttttcatgggtgtctgctgctcctcaagtctttcctctgcctccgtttcaagctgtttctttgcaatcgcaacttttgtagctacgttctgacttcttgagacaatttcaatctctgtcatgttcaaatctaatttttcatacacattcaaggtctctttcattgcctctttgatttttgttcttctgatttcctccactgtttcacctccttgtgttgtccttgaatacataatatgcgtctttgacaactttgtcaatagttttttgtattctttgaatacttttttattgcattttatttcaacgagtgttatgattcatagagatgagcaaaacacattaattcaaaagtaggacgtggcagttagtttccataaagtttgaggttacgattttatggcatagcaaagctaacgtaagtccaaaacttacgaaatcataagactatgagaaattttcaatcaagcaattcgttttattgtttttagtttgcgataagactgaccggaatgtctagtgattgcggcaacggcaactgccagtaaactgatatgggcaagtgtgtttaagtttgtaacagacgctttatttttcacccacatccgctcctgaccagtatttttaaaacgcgaattatagcgttcacattctgtgcggagtgaataattactttcaaaatatttgctgtccctatcaatggaaagtcttaaatcatcaggaatggtgagatatttcgtacagccacgatgctttttaccattatagaaatttttgtggtggcatgggcaaacggtatctttacttgattttagaggacaacaaaacttttgacgggtacgaccacaatcggaaaacttaccatccttccacatggcaagccctgcttcgcaaatgggattcccttgaggaagaagtttcggatttttggaattacgtttgtttaatggaatgatacattctccattgtaaagatccttaacctgattgtagatatttttgacatcgtaacctttgtcggcaaggaatgtgcagtccgttattggttgaaaggaatgggtagcagcaaggatatctaaagcgacggtagcatcatgaacttccgcggttgtggtcatttcataaataggaagacctgaaatacagtctacaaggacatgatttttatagccccaatagaattcatattttttctcgttcgtttgattggatgcagtgtggacgccgagtttacaatccgaatccgcccttggttgatttccgggtttaaacttatttgagagaaaagatttcggattattctgtgaagtatttgcagagacaggggttgaatctaagccaataaaagaagtgtctacaataccttctttagaaaggaataacacctgagttttcatgatttcagagagaattttgttatcgaaatttttcaggaagcgatcaaaagtccaataagaaggaagtggacgagaaatatcaaagccacaaaaatgcgcaatcagaagattattgtgaagataatcgacaagatcggaaatcatggagaagccttcgcatttcatgacaataaaggaacaaatcatagcgtgatttgaaaagcctttccttcctgtcttggggaattccggaacaaaggataaatcaagattcaaaaaaagagaatcataaaactttgcaactggttgtgaagtgaaaagacgaatgtctttcaaaatttcttgacgatagataacaatcagctcctttcggtgaattgattttgacaacttaattatatcatttggagctgattgttactataaatttgaagtgattaatgaggttgccatgcctcgcaaacccgcataaatactgaatgtgtggagttttgctcatggctattatgattcatgaaaaggaggtgttcacatgacacaaaatgagcgtgtaaaggaaataagaaagacgctcggtctcactcttgagaaattcggggaacgtatcggagtgacaagaggttcaatgtctaatatagaaaacggaaatcgcaacctaaccgaacaaatgacaaaatctatctgccgtgagttcagcgttgattatatgtggttgactactggtgagggcgaaatgttcattgacacggacgatgatttcatcgaacgcattgaccgcatcatggcgggtgaggacgaggcacgaaaaaaccttttcaaattcatgcttgagttgagtgacgaggacatcgttgcacttgaccgcttaatgaaaaaagctattgagttcacacaaaataataaagaaaaagactgacagccttttcaactgtcagtctcatgggtgtacagatacgccacgaatttatatatccttttgaggatgcgttcgttttgtatcttcccgactatttcaacaatagcctttttgtaattcaaggggaacaccccctttccgattacagtgtatcatatatttccatgattgtggaaatattgaggttgatttccataatcgtggaaatcgttcctcctgctgccggaatctcgctgcaatgtgatacaattatttgtattcggattcaaacaggtcggtgattttaacgcctaatgcaatcgctatcatttcaagttgaaacaatgtcggcgacaccttaccgttttcgatgttgtttatcgtagactttccgattccggatttcttcgatagctccatcaatgtgaacccttttgaggttctcatttcccaaacgagaattttcatcctgctcacctcctttctcaaggaaagtgtacagatagaaaaatcccgctcgaaatcaacggttgtttcactaactgcaataaaaaaaagacgacccacgctgcaacgtgaatcgcctttgtgaaacttccgtctcatgcttctgcaaaaggcacttgatagatagttcctgcaaacaccattctatcataaaaccgtgctttttgcattggttttattttttatactcttttttaggatggtgattttatgaaactaccgaacggattcggaacggtttacaaactttcgggaaatcgccggaatccttatgttgccaaaaagacaaaaggatgggaaatcgacccgaaaacaggtaaatcaaaacaattatacacggttgtcggatattacccgacccgtaaagaggcactcactgcattagcagaatacaacaaagacccctttgacctgcatctcgcaacaattactttcgaggaggtatatgagagatggtcagaaattcattttgagaagatcaaggacacgaacggttataaagcagctttcaatacatcaaaagacctttggaaaatgaaatttgttgaaatcaaactcgaccatctgcaaaatgtcgtcgataattccggcaaaaacactcccactctcaaaaccttaaaaatcatgtggggtcttatgtatgactatgccgttgttcatgagattgtatctcaagataaaagagacattgtcagatatgttgatataagcaaggcgggaaatccaaacgcatacaaccggaaacctttttcaaagaaagagatttcaattctgtggaaatgcaaggattcaaatgtatatgtcaccgtcatcctcattatgatatattccggtgtcagaatcggtgaactcctcgaccttgagaaaaaagacatccaccttgatgaacgatggttttatgtaaaagaatccaaaacagaggcgggaatcagagaggttcccattgctgaaaaagttgtcccattctttgaatactggatgaaccggaaatgcgatcatctgatttgcacacccgacgatgaacctttccagtaccggaattattatgattcctattggattcctttgatgcttgaatttggtttcggaaaattcatcattgatgaaacgaaaaaagaacctgtttatgatggacaccgcccgcacgatacacggcacacctgcatttctctcctcacggaaaagaaagttgacgagagattcatcaagaaaattgtcggtcacaagggacagggcgtgacagaaaccgtttacacgcacattgaactcccgaccaaacttgaggcgatcaacaagatttgaaagtgggtggtgtcatgaatagaactgaatacaagaataatttttataaagagcattatgaaagaatcaacctcgcagtccctaaagggatgaaagagatcatcaagggacttgcatccgacaagggaatgtctgtcaacgcatatattcaagaccttgtcagaaaagaccaatgcggtttattcgacacgatgcagattgcagagaagaacagagaaatgctttccggaatcaccggaaacatgcacaacggatatgacatcattttcaaggacggtcattcctgccactgccggacgaaaaaggatgtccggtcatgtatcattgaatactgtaaagaaaagggcgattgaaccgcccttttttcatgtcaaaagtgtcttgcacaagatttcaaaagtattgcacaagacacctgttttcgtgttagttacctgtgtgttacctgttagttaccggaacatttttgtgtgttttgaggttatttgatggattttcagaatataaggaaaaccccgaaaacactggattttcggggtttgttgctctttttcgatattcggttgaattatctctttgagaactgaggagctctacgagctgctttgagaccgtacttcttacgctctttcatacgtggatcacgtgttaagaatccagcagacttaagaaccggtctgtactctgaatctacctgaaggagtgcacgagcgattccgtgacggattgctccggcctgtcctgtgtatccaccaccacgaacgttaactaaaacgtcgaacttgtcaactgtctcagttgcaactaatggctggcgaacaactacctttaatgtctcaagaccaaggtactcatcgatatctcttttattgattgtaatctttcctgttccaggtactaaatatactctagcaacagatgattttcttcttcctgttccgtaatactttgtagtagccaatttactttacctcctattaaaactctaatgtctcaggcttctgagctgcatgtttgtgatctggtccagcgtatacgaataactttgtatacatctgacgtccaagaggtccctttggaagcattccctttacagcgtactcgataacgcgctctgggtgcttgttcatcatctctcttaatgttgtctctttcataccaccgatataatctgagtgatgatagtaaatcttctggtctaatttcttaccagtaaccttaaccttgtcagcattgacaacgattacataatcacctgtgtcaatgtgtggtgtaaagattgctttattctttcctcttaatactttagcaacttctgatgctaaacgtcctaatgtcttaccttcagcgtctactacgtaccattttctgtcgattgtagcaggactagccataaatgttttcatcggttttcctccttaaatgattcgattacttttaatgccgatgtctcttgaaatcgcgtatgtccggacgccacttcctttttgacatcttatagtcctctgttccatctcagatgactatcattatctatactaaatggttgccggggctttggcttccatttatctacttttacagacctagatattatacttgcgtaaccggctgttgtcaagtgtttttcacccttattttcggctttttctttaagctttttctttaagctatttctttaaactttgtctttaagttttttctttatgtttatactttttctttaaacttttattttaaaactgcatatatacaaaatcagccggattcactcccggtccgtagtaaccgaatattattactataaagatgccaagatatattatcgcccagcgaagcggcagctttcttgaaagtatgaaatcgcgcatgtcgagctttttattttcctcaacgaagctgataaagaaccacagcagagtacatattataagtaaaagtatatcgtactcgtccagtccgcatgctcccagattcaaaatgatgttatttattccaagctcgctgatatggaaatccgtgactgacttaaaaagcatgtgaaatgctgtcgacgcatttgcagctatgtcaaaatagtagcctaccagtatgagcataaaggtccaaagcactgatacaattgtcgcaaatatacccttttcccttaggccggtcagcttaaaaaagccgcctgccacctttttgtttaccggagcaaaaagctctgcaagcatgattacaatgccgttccaaagtccgaaacacaggtatttcatattggcaccgtgccatactccgatgacgataaatgtgatgacactcgcgatgcagcccggaagcaccttactgatatgcgcaccaaatctcggctttagccatttgccaaagttcaggaaacgctttgagattgaaagcgggtagaagatatagtttctgcaccagtctccaagagtcatatgccagcggtgccagtactctgtgagtgagcgcgaaaaatacggatggttgaagtttgttgacattgttataccaaacatctccgcaataccgcgcactatatcgattcctcccgagaaatccgcataaagctgcaacgcatacactactgccgcaaaaaatacataagtgcccgaaaaatccatcggcttatccattacaaaattgatgatatttaccgcacggtctgctatcacaagctttttcatgactccccagagcaccagaagcgcgcccttttgcagattttcaagtctcagggaatgtccctcgtaaagctgtcccgcaagcttatcatatatcgcaatcggtccctgtatgatctgtgggaaaaatgatacaaacagcgctaccttaaggaaattcttttcaggctcgacaatttccctgtatacatccatcacatagcccatggactggaaggtgtagaaggatatgccaagtggaagcaaaagtccaagctcgcccgcatatggtatatatttaaggaatgccagaatgccgaaattgcaaagcagcgcaaaaagcatgactgccactctcttttttctgcccttttccttgtattcctttctggtctgtctgtcccagtcctccttgtggctttttacgatagcattctgctcctttagcagcttgtcaatccatattgttgagccataggtggtgcatattgtgaaaatgataaacagcacataccacttacatataatcacatagtatgccatgcttcccgccagaagcacataccagcggtatttcttcggaaagcaataatatagtacaagcaacacgattacaaatatcgcatattttaatgaaatgagttccattttatttactccaaatctattttctaaagtaatactgccagacatactttaattaacaggcagtatttattttaaagtccatacactatcatgctatttttttaccggggtatttaactcctttgcaggctttgcttcgttgttcgtatctgctaccttatttgtcgcaaggcttgacgaaaaattataaggcagataaacggacatctcaaaataatgattgcccagactcagatccgtatcctttgcgcaggcacttatcaccttgtcagcgcgccttgcgcactcgccccatgcactctgaatctccggtgagtggtctgcattaagcctgtaattatcagacagatattttcccataaatgcagtgaatttgaggcttccatttatattcaggtgctctgaattgtagaaatcatccctctcattgattccgataaattccttatcgccttcaaagctcgcaaagtcatagccataagactccaccagctccttcacgtcacaaagcacctgcggattctttatctccttctcatgagggaacctcgcaaaaagcaccttttccaccccctgtgctttacaatacttaagcagatcagtcatatacgctctgctcttgtcggtaaaatagagctttttctgcttgcctgatggacaatcggaatattttgcaatagatgaaaatcccttcatgcatgatgtttttgcaaaatacattccaactcttgtggcaaaggtgtgtgcacacttgcctatatccttccagttgctatgatgcagctttaaaggatttgtaaagttgtcctgctcatcctttggcacaatctcttgtattgtatcaaacctgttttccttattgtggatattgtctatccaactatgcagctttacagtcctgtcgtaatagctgtcattttgtaaaaagccattcacttcaaaaaccacaaccttcggatgctgtctggtgagagcttctctgagcatagatttgtacagactgccgggcactcctgataccccaagcgagtatgatgtgtatccataattcttccaggcctcggttgcgctgtaatcagcgtatacctcgctggctcctatcatcatcacatcaattgtgttcttcggctccttgtaaaacccctctatagtcgcaatattgacagcatccgtcatcttaaaaaatgtcgagacaaacgaaaacagcacgacaaataccagggcaaacgctcctatacggattaccttacgatgtctgccttttccttcgtctgtgctgtttatgggtttgttttttataattttctcttttacttttgtaaatctcataaccgtcttcatctccaagcttctttttaccgtaccgtgtattaactgtaacgacattatagcctattattgaagctaaaaactgatattccaaaaatcttaatataatattaaaaatctaaagctgttactcgtacttgagtcctatcattgtaagcccatgggccggggctgtaggacctgctgctgccctgtctgttgcggctattatgtccttcatcgcatctgccggcatatcgcttccacctatcttcacaagtgttcctgcgattatgcgcaccatattgtacaaaaagccgtttcctgtcacacgtattgtgatgatgtcaccggcctttgacaccgtacagtcatatatcgtgcggactgtggtctgtgcctgcgagtttgccgagcaaaagcttgcaaaatcatgctctcctatgagatattttgcagcctcactcatcttttctgtgtcaagcggataatgatagaaatatgtgtcaagcctgcgtgtaggatttctgaacctcgcatttaatatgcggtattcataggttttacggctctttgagaagcgtggatgaaaatcatcgcttacctcacaggaatcgaccaccactatatcctccggcagcttctgattcagtgcatacgatatcttttccgccggcatgcgggtattggtgtcaaacatacacacatttccaagtgaatgcactccagcatcggtgcggcttgctcctgtcacctttatatcctcctttaacaggcggctcaggtgctcgtttaatacctgctcaattgttatgccgtttggctgtatctgccagccgcagtaatttgtgccatcgtaggctacaatcatttttacacgcatatatctctcctgttttgcctgcactatctatttcactatctgaaaataagattgcccagattcaccggcagaaggattctaagcactatcacaaccgctaaaaacgcaaatatgaaaagatatgctattttatcgtccttttcatatacgagcggcttcatctttgtcctgccctctccaccattgtagcatctggcctccatggccattgcgaggtcatccgcacgcctgaatgccgatacgaaaagaggcactaaaagaggcaccatgctctttgctctttttatgatatttccatgctcaaaatcagctcctcttgccatctgtgctttcattattttgtccgtctcctcaataaggattggaataaaacgaagcgctatagacatcatcatagctattgcatgcaccggaacatgtattttgtttaaaaagcccagtgatttctcaagaccgtccgtgagctggtttggtgtggtggtgagtgtcatgagcgaggttcctataatgagcagcacaagtcgtatcatcatggttgctgcatttatcagtccggtgtcagaaatgtgcagtataccgtactcccagattgtgtactctccctgtgtgaaaaacacgctgaagcatgctgtaaaaagcagcagtattataatggatttgagtccctttaccatgaacttaaagggcacctttgatatctttataactgcggcaagcgcggcaactataaacagcacaccggctattcccttgtaggaaaacagcgcaataatatatataagtgttgcgaaaagctttactcttgggtccagtttatgtattggcgactgagccggataatactggcctatggtaatatcacgaatcatttttgtattccttcctcataatttgtatcaaaatgtcagcattggtgagctatttaaaggcttttagtattgagtccctcgcctccgcaactgtcgtcgccgaaagatcaaccggtatgcccttttccaccagatcatgcatcagatatgtgacctgcggtgctgcaagtccgactgcctcgagctccttgtagtgtgagaatacctccttcggcactccgtcaaacatcacctctcctgaattcataacaatgatgcggtccacatactccgcaacatcctccatgctgtgtgatacgagtatgattgtaatacccagatcttttttcatctgtaaaagcagtcccagtatctcatctctgcccgcaggatccagtcccgctgtcggctcgtcgagtatgagtacgtcagggtgcattgcaagtactccagctatggctacacgccttttttgtcctccggacaaatcaaatggcggctgatagtagagatcctccggaaaatgtacattctgcagtgcctcataggctcttagctccactgtttttctatcgagcccctgatttttcggtccaaagcatacatcctcaaagttggttgtctcaaaaagctgatgctccggatactggaacaccatccccaccttgtgacgcagcttgcttaaatcataatcattgtcatatatatcctgtccattgtagtatatatgaccgcttgtcgccttcaaaaggccgttcatatgctggataagtgtggattttcccgaaccggtgtgaccgattattccaataaactctccatcatttatctcaaggcttacatccttaagtgcctgcaccttgtaggctgagtcggcactgtagcaatagtttatgtgatctagaattattgacatattttctcccgcctatctgtttttcagcgcaacaagcgcatttacaagttcttctctcgtcaggattccatcagggatatcgagccctgcctttttgagctcatcggctaccagtgtcacctgcggcacatcaagcctgtgctccttcagctcgtccacccttgaaaaaatctcacgcggtgtgccgtccatgaccaccttgcccttttccatgacatagacatggtctgcgccgaccacctcctccatgtaatgggtgatgagaataatggtcacgccctttttcttattgagctcatgggctgtggctatgacctccttgcggccgtttgggtcaagcatggctgtaggctcgtcaaatactatgcattttggctccattgccacaactcccgcgattgccacacgctgcttctgtcctccggagagcttgttcggtgaatgtgtgcggtactttgtcataccgacagcccttagtgcatagtccacgcgctgccagatttcatctgtcggcacaccgatattctcaggtccaaagcccacatcctcctccacgacattggcgataatctgattgtcgggattctggaaaaccatacctgcacttttcctgacaggtatgacattctcttcctttgacacatccatgccatccacccatatggtgccgtcgctcggcgcaagaagtgcattgatatgctttgcaagagttgattttcctgaaccattgtgaccgaggattgcaataaactgtccctcttttatgtcgaggtttacgttgtcgagtgctgtagtgattgactctacattgccttcctcgtctcttcgtataaattcatgtactaatttgcttgttttaattatgcccatttctttttcctaaaaatctaccgtatttacaattatcatagctgttaaagcccaaatagctgccaaaaatatgcgctttgccgcttgatttagtcatcccagctcaggtgatgaagctctccctcaagcctcatatgatcaaaattattctgtctcaatgcctcgtagagcacgatagctactgaatttgacaaattaagtgaccttgtctcacctatcatcggtatcctgatgcactcatccggatgctcctttagtatctcctccggaatgcctgcactttccttgccaaacataatatagcagtcgggctcaaaatgagcatcagagtacacatgtctgccctttgttgtcgcataatatatctttgcgcccggatttctctcaaggaaatcctcccagtccacatatgtggtgacgtcgaggtccttccagtaatccattccggctctctttagtgccttctctgaaagtgagaatccaagcggctctataagatgaagcctcgtgcctgtcgcgacgcaggttcttccgatatttcctgtatttgccggaatttccggctcatgtaacactatgttcagctttgccattttgtctcctgtcaatttaaactatttattatccatcccggcgcgaagctctgtgacaaactcctcaatgcggccgagcgcctcctttaaatcatcaagcgaatatgcatatgatatacgtaaaaatccctcgccgcactctccgaatgcagttcccggaaccacggcaatcttcttgctgtttagaagctttgtggcaaactcatcggatgtcatgccaaactccttgatgcttgggaacgcataaaaagccccgaaaggctcaaagcacttaagccccatctccttaaagcggtgaagcacatagcgtctgcggccgttgtattcctccctcatctgtgcaacatcctcatcgccgtttttcatagcctcgacagccgcatactggctcgtggtcggcgcacacatgattgcaaactgatgaatctttagcatctgctttagaattgtttcaggtgcacatgcatatccaagcctccagcctgtcatggcataagccttggaaaaaccgtttataagcactgttcgctccttcattcccggaaacgatgctatagatacatgcttatccacatatgtaagctccgaataaatctcgtcacttatcacaaacagatcatgctccttaaccacctgaacgattgcttcaaggtctgctttttccatgatagcgcctgtaggattattagggaaaggcatgataagtatctttgtctttggagtgataacagcctcaagctcctcggctgtcagcctgaaatcattttcctccttgagctccacaatcacaggtgtaccacctgccagcacagtacatggcacatatgaaacatagcttggctgtgggataatcacttcatctcccgcatctagcatggcgcgcagtgcgatatctatagcctcgctgccaccgacagttaccatgatctctttgttgtaatcatatgtcatgccgtatcttctgtcgagatatcttgcaatctcaacctttaactccttgagtccggcatttgaggtgtagaaggtgcgtcccttttcaagggaatatatgccctcatccctgatatgccacggtgtgtcaaaatcaggctcacctactccaagcgatatcgcatccttcatctcgctcactatatcaaaaaacttacggatgcccgatggctggatagtctttatggtactggataaagggtctctcattatgacataattcccctttcatcggattttacaggtgccgccatgatagttccatggtccttgtatttcttcagaataaagtttgtctttgtcgaaagcacctgatccagtgtagaaagcttatctgtcacaaactgtgatacctcgcgcagagtcttgccctcgagtgtgaccatgaggtcgaagccgcctgagataaggtatacagacttcacctcaggatagttgtatatacgctcggcaattttgtcgaagcccatgccgcgctgtggtgtcactctgacctctatcatagctgtgaccttctcaaggcctgccttgtcccagtcaatcagtgtgtgatatccgcagatgacattctcctgctccatagcagcaatctcgtttgccacacttgcctcatccacgccaagcatgattgcaagctccttcaggtttattctgctgtttttctctataaatgttaatatcttttctctcatgatatatagtctcctgattgttactgttcagacgcaagcttgacaccacgctgtcaagctatgcgccatagtgttaattattgagtgattacagcccctgcctcgtagaggcattttaaatgggctgtaatcgttgctggtcacactgttaggtgtgaacagtaactcctgattcaaatatattagttgaaaaccttgtatatctcgtcagtctgggcagtctccaaaaaccgtctttcctcgccggaaatcagcactctgtcgtttgaatcggttgtggcaccgactataacagcattttgtcctgttttctcaagctctctgagcacgcgggtaccatctgcagctatgattatcagacttcctcctgacaaaagcttatacgggtttatgtcaaaaaattcacttatttcaatcgtatcctgcctgatagggagcttctttaaatcgatgtcaagaccaattcccgaagcctcggccatatcccagagtgctccaaagatgcctccctgcgaagcgtcatggattgccgccacaccggcgccaatcgcggatgcagcctccattgcggtggaaatatggtctatatatgctgctgatttatctataaatgtcttggaaaatctcgtttcaagctcggctcttttctcatttgcaagaattgcggtgccctcaagccccacatagcctgtaactattacgtccatgcccggtgctgctgccgatgatggtgtaagcgcctgctcataggcctcacctattgctgtaactgtcaccacgatattcttcaccgcacggctcacctgtgtatgtccgccaagcaccacaattcctgcttcctcacatacagcatcaatcgctctcaccgtctcgcgaagcacggcttcgttttctgtggtaggtacaagcagtgccagctctatcccaacaggacttgcccccatggcataaatattgttcaatgcatcataaactgcgcagttagcacgcacatgcttatccgatacatcaagtgtgaacgtctgggtagcagtaactaacttggtttggtcacctgcctgcatggaaatcaccgcacagtcctcacctactgccggtttaaaaagtattctgtcgcttttggtatgaagttgttttaagacagagcgctttaaaaccgactctgatattttaccgtttttcatgtgttttcctgttcctaataataatatgttttgtatactgttgcagcccggtgcattgattgcaaataactacatcagaaacaactacctgcgggcatttactgcgtctgggtgccctgtgcctgccctgctgcattctggtctgtcggctgcgtctgtgtaccctgtgcctgccctgccgcattctggtctgtcggctgtgtctgccctgccgcattcggatcctgtgtctgagtctgtgctgcctgtgcctgaaccgctgctgccgcagacgcagcaatagatttaaccgagccctcatcattagccgctgccgccgcctgaagctgcgcaacaacctccgctgatgctcctgctgtaccaaccgtcacaatttttggtgatgacttgtacttgctgttgttgaatacctcatcgctctgcactgttccatcaactgtgaccgtcttccatagccttgcggttactcccttgtgcgcagactgctcggtgttgaaataaccgaccggctgacctgcatcaaacttaaactgcgtaaccggatcctcctcggaaatcgtctcactcctgaatgaaatttccctgtttgccggtctcgtctccactccgtacacattgaaggtgatgactccaccactgcaatagccctctatatacaccggattgtccagattatttttaaacttaagatccttgtaggtacctgcgattgccgcatcgtcagatggctttacgtagcttactatcatggaatggttgtagcgctgcactatctcaagctcagcccttataaccgcattgtagagtgtggtagcaacctggcacacgcctccgcctaccgaatccactacctgaccgttctcgtatgcgcctgctatctgatagccgttgtcagttgtgatagggctgatagcctcgtaaaccgagaactgctcccccggatatatgacactgccgtttatcaggctgcacgcgttctttacattggttgcacgccctgctgccgagctgctgaaatcggtagaaaagcctcccagattatccttaatctttgagagctcctcctttgagcccctcggctgaaccgtatttgtgaccagctctatctcattcgccgaaccatcccagctgttctgcaaaaagtcatttatcgcatagacggattttaccacatcaacctctttgccttcctgtcccgggacaaaatcgaagctgtcaccgtttctctgcagcgaattgtcaactgcctttatattgagctcgtcgctcttgtcataaatcatatttgcagtcttttgtttatcaaccgacagatacatattgacggcaacattgccctttttgagctcctctgattccacaaatctgtcaatcaggctgccctcatggcacactgaaagagcctcgtccaccgctgcatcagtgtccgccgaaacagacatttcctgtgctgttgcatcaaatgaaccattggcaccctttaatgaaaagaatgtatcctttatgctgtcaacataggcatcaactgctttttttgcttcttcctttgtcataccgcctacatccacactgccaatgcacacaccctctgtaattgtctgtacctttgccttctttgtgcctgacgaaccgcttgcatatgcacttaccatgcctgatgctgccacaagcacaaatgccattgtacccagtaataatgcttttttattaatcttcatttccgcttccttttcctgaggctgttaaaagcgcccatgtcatcgcttaactgaactgcattttatatcatattatgatatgagggtcaaaatgtattttgcccctcatttatgattaatcagattactacatgctacgcattcccgtaatctgactacacctcgaaatccgctaatttcctgcgttcccgcagcaaattgctactttctcggtgtagtgcgggtcactaaggtatacatcgaattgcatgcaagcatgcatcgatgataccttttgaccctttaatcatattatcatattttttccatatttcaagaaaagctatacaagacttgacacaaatgttgtcacaagcatcgctgctataaccactattatcactatagcaaccaccttctgatttctttttttattaaaatcgtacatactattcacctctgttcaaaaatgagttatactattttcatatatgagaaaggattttccaacatatgattccaatttgtctaattttattcattttatttattgcagtgattacttttgccataaagagggctgattctgcccaggcaaaggtcaccgaggagttctgggaaaaggagcgtaaggccaactcaaccctccgcggagataccactgacctgtgttatattaccataccggaaaagttttttccattaaataatgataaaataaatgatttaagggataaaacccttgtcaatctcaccggaatgacaaacactgatttaaagcttaaatatggcattctcaattttaaaaagctgtctgaatatgatgataatttcacgaaatttgtttcaatgcttgagagcttacaggctgatgccgcctcggccggtaattactcacacctattaatgtacttactgcgatattcatcgtacagccttgaggcctgacttctggtcaggttgtcccacgatatgacatctgctatcccatactcagtcatcagctcctttagctgtctgacctgatgtgctgtggcgggtgtctgtttttttgccttgtatacaagtggctttgactccaccggctcacctttttcatccatcagtgcaagcagcttttcaaatatctgctttgtctctatcgcatcatcgagcgccctgtgggcattttccctgctcacaccaaaatactcacacaaatcctccagcttcttcgactgctcagcaggcagacattttctggctattttcagcgtatcatatgcattcagcgagagggttcgcttgtgatttaccgcccactgctttaaaaagctgtaatcaaaggtcacattctgcccgagtatgatatcatctccgataaaatcaagcaggttatccacggccgcgtccatatctgccgcgttttccacatcactgtcggtaattcccgttaattcctgcacacgctgtggaatatgctgctttggatttaccagtgtggatatcgtatccactatctcgccgcccctcacacgtgctgcacctatctctattatcttgtcatttttagctgaaagacctgtcatttccaagtcaatcaccgtgtaattttttatattgtctatgttgctcatttttttagtccgtaaacctttccggcttttaacactatagtcatttcacgttactgctcttttatatactccgctatagccatatcgctttactgctattttatatactgcgctatagccatatcgctttactgttattctacatactccaccagcgcctggtggtcaagcgggtctctcatgtcgtagtggaaaagcgcccacaccggctccttatgatactttggcagttcatccagcttgcgcatgtgcttgtaaggaaaaatatagtggaacggctccacatgcgacagctttccattcttacagtatgcatgtgtcatgtgcttgaagcttcctatatctgtggcccacctcgggcggctcttgcagttctcacgatagtacaaatcaaagatgagtgactcctgaatcatgctgtaaatctgcgcattttcgtcaaaatcagtattatctctatctccgtgattttcgaataatcccacagaagtcatagcatcgctgtcacagccatgcaggtataaagccagaaactcaagcagtatctcacaccttctgatgcgcgaatggctcattccaaaatagccgtttgcctcataaaaatctccaagctcctgaaaaaactcaaacgcactgtcaaagatacactccatgagcttcatcgtaatctcaaactgtccgctgttgtaatacacctcaagcatatcctcgacgcgcttaatctttatcacatcatcaaacgaaagccattttgtggacattacctcatacggcggcttgtcatggtacacaataccatattccgcggcatgctcaaacatgtacgagcccttgagcacctttaaaaatccaagctgcagctggtttggcttaagctcataaatctcatcaaaggaacgcccaaagctgtcatagtcctcgtatggcagccctgcaatcagatccagatgctcatggatattgttgccgctttgaatgagcctcacaacctccttaagcctctcaagcttcatagtcctgtgaatctccttaatcgtgacctcattggtggactgcacaccgatttcaagctgtatcagccccggcctcatatcagaaatcagctcaagctcctcctgattcagcagatccgctgatatctcaaagtgaaagtttgtcacaccattgtcattcgcctttataaagcgccacagctccatggcatgagcatgattgcagttgaaggttctgtccacaaacttaatctgcggcaccttctggtctataaaaaacttaagctctcttttgacaatctcagtatccctgaaacgcagtgtcttatccaccgatgacagacagtagctgcacgaaaacgggcatcctctgctgctctcgtagtagatgatacggtttgaaaaatcatcgagagtatcatagcagaatggaatttcactcatgtttttaattgggcgtggacttgtgaatactatttcaccggctttattgtctcccatgttgttcacacttgtactattacctgtgctgttttttctgaaagcaatgcctgcaatatcactcagatttcttttatgcgcatagtaaccgcacagctctctaaaggtatcctctccctcgcctatcatcacaccgtctatgtatggattttcccgcagaaatgcctccacctcgtaggacacctcagggcctccaacccatatcggcactgacggacaaagctttttatactcgcgtgcaatatcagtcacataatcaatattccatatatagcacgaaaaacaaagtacgtcgggctttctcttgtaaagctcctcaagaatgtaatccttttgattgtttatcgtgtattccgcaagctccacagcatccctgtactccccggcacaggcgcgcagtgagtaaactgcgaggtttgaatgtatgtattttgcattgattgctgtcaataaaatattcatggtttctccttaaaaaatgacccttgaatgtagactttatgccacagtgaactacccattgtcttaagccaatgggcttcctgcttcaacgacctcgtaacctactatctccacaggcgttaatttgggcagtccctgccctatatatttctttatgctatttgtcttaatccttctgtcagtatattttttgcggcattgatatccctgtcatgtcctgctccacatttcggacatatccatgtcctcactgacaaatcttttgtatctggattctgatacccgcaaacagaacataattgactactagcataaaatgtatctattttgatgtatttcctgccattccattttgccttatactctaactgtcttgtcagctcataccatgatacatcacttatggcttttgccagatgatgattttttaccatgttttttatctgtaaattctctgaaactatcacttggttttcgctgataatctcatgtgaaactttatgtagataatcttttcttatgttccttattttctcatggcataatgctatctttttctttgttttataatagttcttacttctctttcctttatgtgacagttgcctttgcagctttacaagctgtttctcgtatttttttataatttttagattctcatataccttcccatcggaagtaatacataaatctttaattcctaaatcgattcctatgttatgatttgtatgtgccagttccttatgctccgtttctacaagtatggacacatagtattttccactggaaacctgcgaaatggtcgctgacttaatctgcccactatattccctgtgtaaccttgcttttaccgcttttaattttggcaattttatcttccctgtctcaaaatctaccgcaatatttccatttgtgaagtttgttgtgtatgatttatgattatcgtgtttactcttgaatttcggatatcctgcatgctccttaaagaatttttgatatgcagcgtccatgttatagattgcgttggtcatagcaaatttatctatttcttttaaccattcatagtctttctttaattctctgttacagtaattattacaatccgttttactaactgactttttctctttctcgtatatttctttccgatatgccaatgtctgattgtaaacaaaacggcaacagccaaatgtttttgcaatctgaattctctgttcgctattaggatatatcctgtatttatatgcttttaacacctactgtcgccaccttcctacccttgattttctatatattttctcaacatctcttctgaaacacttcctacactgcggacaaaatatccgtcgtccaaaaagtatgttctttccaaaaatgttttcgtagataatgcgaatattttttccaaatatgatatgttgtataactcttcatcagatttactattttactgatagacattgttggttctgtttctatcatgtaataaatatgatctttatctgtctccatatatctgataatgactttatgcttttgacatatctcataagaaaactgctttatatcatctgatatttgttttgacatcagcaatttctttctatacttgcatacgaatataatatgatactgtaacaaatatttgtgtctgttttttgatttccacgttcccataacgcaagtatagcacaaacctctccgcttccggctaccttaccccatcgtctaaagccagtgggattgcggtagccctatttcaaaaatccaataactcttctccattgttctcacaaaatattatatggtatttttaccatattgttaaatcagttactttaatttacatcgacatattaacaagtctgtcataaatgccgcttgcaaacagcaccatcatgccaatcgtgcagatgaccgacagtacaaagcctattatcgatgtaatcataccggcagttgctattgcattgttatactgctttgccctttttgacattttggaagcaagcatgccgacaattccaagccccatcagatagccaaaaaacgagaaaataatactgcaaatgccaagcaccagtgaaaccactgccagcttagcgccctccctctcgtcatctatgatggtcacattgttgtaaagcatctcaagacggatacgccttgacttacgcagcataacaagcataggaataccgagcacgacaaatgcaatacagttcattgccgaaaactcattaatcctgtcggccactccgcctccctcaaatattcccgatgataaaagccctcccatatctacaacagtatggaaaatggcaagcatccagaaattgcgtgtagacgcgtatatcatacaaaacagcacacccatgagtcctgctgaaataacctgtatcagacaactgctgaacttaacccctgcgcccatattggaaaaatgcatcaatccaaacagtacgcctcccaaaactacggctcctgtgattccacctttcgtctttggaaaagctctcagcagcagattaaacactactcctctgaacaccagctcctcaacgagccctacaaggcagaccacaataaagaaaaagatgatgttgtaaaatgccttcacatcaccatgctcacccaaaaagcacaaataaatgcctgaaacaacagcatacaaacagtacactatgaaaaaaccgcctgtgtataagcttcttgtccatcctgctgcattttccttaaaaatatcccacagcccaaatatatatgtgatgccaagaaaaataactaaaacaactgtctccacaatagcctgcagcagataatcatccgccttttccatgcccggaatcagtcccagcacttttccgctccactgcaagggtgcaatgaaaataaaaactgcaagaatggcaaatattatatttgccggtgccgaaaggtttctcaatttctgtttcataattttaaatctcctcatttgcgtttaatttgatatgaaaatattctatagcatttactttgacattgcaagcaaaggatttcatacttcaatggacagcaaaaaagccctgtccttacaaacagagccctatgcattattttgcacttacaagtcttactatcacatcaattccagccgcccaaaagagtatcgcccccacgatatatacctttgtcttctgctcgaaaccgtagtgatatcctgtgtaaatgcctgccactatacagatgacagtgagcagcgccaccattatcataatggtgaaaagtccggtaccgaggaatccgaatgctattcctgcaagaaccgtataaaatgcggtgattcctgctatccttaacactcttttcatatcaagctgtgcctgacaatgctcctcaatcctttcgtttcttatagcctttcctataagtctgatccccagtcctatcagtattccgatagaaattatctctcctaaaagtgcttcatccttcaccgagtatttcccattaaggaagcttgacaggaaatacccgatgtacattgctaacaactggcaaactgcaactatgaagcaaatggctgtaagctgtttcttatttactttctggatcagggatccctgacattccatcgcaacgaaaatctcaagcgaacttcccgccacgattaacagatattctatccagcccatttttgcctccccctaatgtacaaacatcctttaattaattatttgtcgctatctgccttagcatctattgaagctaatttatatatgaacttaacgctgcccgtctgtccatcagcgattgctgagtatgtctgatattcctcacctgcgtcaattactgcctgaagcttgtcggtgaatggctttaagtcaccgttgtatgcgtcgagaatcttgttgattccttcctcattgaactgtaccataccgtctgcaagtgtgtgtgcaccctctgaaagtgtcttagagcctgttgtgagctggtcaacacctgaaactatctgatttgttccatctgcaagctgtgaggctccgctgttgagctgtgcgttatttgctacaagtgtgtttgagccgtctacaagctgcttgataccacttgtgagagttggtactgagttcatgagtgactgtgttccggctgaaagctggcttgctccggcattgagtgctgttgctccggcatttaatgtatcgttgtttgcaactaatgtatttgagccatccacaagctgcttgattccacttgtaagcgccggtactgagttcataagtgattgtgttccggctgaaagctggcttgctccggcattgagtgctgttgctccgacattaagtgtatcattgtttttaactaactcgtttgaaccatttacaaggctggtgattccttttgtcagctctggtaatttatctgcaagactttgtgtgcctgtctgaagctctgtagctcctgttgcaagctgtgtagttccttttgctaaatcagaagctccgcttgacaactcagatgctccatctgacaactgtcctaaaccagcatctaatgatgacgcaccatctgatacctttgctgagccatcctttaaagcttgcactgtggaagcactgtctgttacactttggttcacggcagaatatactgatacagcaccttttccctgagatagaccaacaagtatctgattataagttgcagatggattctgattctgcatattagtcaaagcatctattatatctcctgcattgtttactgctgcatccgctgctgctgatacattgtctgctgtaatcttatctgtatcaatatatccaagagttttaaataatgttccgacatttaattcattcagtggttccagagatttatttatattggttttgattgtttcaggcatatctgataaagattgtgtcaactgaccaactccttcatcaacctgctttgctcctgctgcaagagaatcagctcctgtttttgccgtatcaatacttgtctttagctgtgctgcacctgcagatactcctgctgcgcccttgtttgcagcattaataccatccgaaagcgtttttgccccatcattaaggctggtcacacctgttgcaagacttcctgtgttgtcattaagctggttcaagcctgtatttaactgacttgctccatccgtatatgatttcaagccatccttaagtgttgcacttccacttgccagttgtcctgctccgctattaagcttatctgctccatcaactaatgcacctgtactgtttccaagtgtattcagtccaccattgagtgtgctggctccatctgtatacgccttaagtccatccttaagtgttgcacttccacttgcaagctgacctgctccactattaagcttatctgctcctgacacaagggctcctgtactgtttccaagtgtattcaatccaccacttaatgtacttacaccatcagtatatgtcttaagtccactctgcagtgtgccaactcctgatgcgaatgtgccgagcttgctctgcaatgttgaaagtccgtcagcaagtgtgtcagtaccctctgccagtgtctttgaaccatcctgaagctgtgttgaggcatcctttaagtcatttatcatgtcatcgaggtctgatgtgtcaattccgtctgtgcttacataatcagatgcgtttaccacgaaggtcatggctgcaggcattgagaaattctccacatctgctgtcatttccatgtattcagggatatttacatcgccatcaagatctccgtccttgattccgaggctgtcctttaagcccggaagagcatagccgagcactacgcttgatgagttgcttacctcagccttgccgtttgtcacttcgatattcttgaagccatcaccgagtacaagtcctgttattgctgcaaatggtacggaaactgtctgcttctcgccatttactgtctctgtatatgatgtggtatttgtgtagtcaaaacggattttgacctttcctgattttcccgcaaggtcctcaggtgagatttcttttccatcgaggtaatatgtaaccttctgtgttacaggcggttcctctgttgctgtgccctgatagtaaatgtccttgccaccggcctgccaggtgagcttgtcaccgctttgtgtgaatttttccttgccctttacgttctcgatatctgaaaggtttgaagcatcatccaaggtatcctttttatctttatttttaaggtgatctactacgattgttttgtttacgttgccgtttgcatctgagatgaggtatacgctctcgtccttgtctgcatcgttatcctttaatgatacgctgtccatgagcttatctgctatgtcatcagcatccttgctgcttcctgttgtgctgtctgcctcggctgtgactgcagtgctgttcttctctgcaaaaaccgctgttgctccgattcctgtacctacaagtgctattgtgaggactccggctacaacacggacaatatatttactttttaacttttctttcaattctggtaatttcatgtcttattcctcctgattttgtttttgaggtcatatttttatgttatgagggtcaaaaagtattttatccctcatttatgattaatcagattactaagctgtcaggttcttgtttttaaagcctgcgcttgtggcacatattactttgtcaaaaatcataaacattgacggaagtataaatactactacaaacatactgatgattgcgcctcgtgcaagcaatatacagatagaactgatcatatcaatgtttgaataaagtcctacaccaaaggttgcggcgaagaaacagagtgcactgacaataactgagtttgtcgaatctgcaagtgcctttgtgattgccggctttttgtccattccggtgtatctgttctttctgtactttgtggtcataagtatcgcatagtcaaccgttgcaccaagctgtatggttccgattacgatgctcgcgataaacggaagctttgttcctgtaaatcccggaattcccatgtttacaaagattgcaaactcgatgaccgctacaagtatgattggaagcgatactgatttgaatactacgaggatgataaggaatatcaatacgattgatactgcacttacacgcttgaagtctgtatctgtgatagtgataagatcctttgtacaaggtgcctcaccgataagcattgcgtcctcgctgtaattctttactatctttttaatctctgtaatctggttgtttacctcatcagatgctgtcgcatattttgatgaaacaagcatcatctggtaatcaccgtttttgaatatctcctttgcctcatccggcaccatatcatccggtattgtaggtccaagtattgagtcaagtgataccgcaagctttactccatcgaccttcttgatatcatttatcatgcttatgctgtctgcctttgacatatcgctcggcgcgatgatgatatgtgtggcacccatagcatactccttatcgagtctctcgttggcctgcttactgtatgcgctgtcaggcatggttcctgcaaggtcatagtaaacctggtcatgagtgtatccgtatattgccgggatgagcactacgatgaaaatcactgcaagtatcttataatgatttgttacccagcttgcaatcctggaaacatccggcataagaatcttgtgctttgtcttctcgattgccttatcacatgcaagaatcagtgcagggagaattgttacacatccgataactccgaatacaacgccctttgccattacgattcccaggtcaagtccaagtgtaaagctcatgaagcagagggctacgaagcctgcgattgttgtgattgagcttcctgttactgagacaattgtgtgggaaatggcatgtgccatggctcgcttcttgtctccgtcatatctgtctatctgctcctgatagctgtgccagaggaaaatcgagtaatccattgttacggcgagctgcaatactgctgtcagtgccagtgtcaggtatgaaatctgtccctgtataaagtttgttcccaggttatagataatagccattcctatgcttaggaggaataacatcggaacaattattgaatccattgtaattcccatgacaagcattgaaagcaatgctgctatgatgacatatataggagcctgctgcataacaagtgtctttgtatctgcgttgaccgctgccattcctgctacgaagcagtggtttttcaccatcttatccatcttgttgacggcttccattgtctcatccgaacccattgtgtcactgtaggtgacgagcatgagctggctgtttgcatccttgttgttaaatgcgtcgtacacctcatccggaattgcctctcttggcaatgtggaatcagcgattgttccgtaccagatgacatccttaacaccctcaaggtcctcaatgtcatcagccagagtctctatgtcctgatccttcatatcctccaagattacaaaagacaacgctccggttccaaactcatctaccatgatatcctgacccttcatagtctctatctggcttggcagataagaaaggatatcaaagttgattctcgtgttgataaagctgatgcccgacggtataagcaatgcaaatgcaactatcagtatcagcacacgatattttacgactccttttccaaatttaatcattagattcaccactctttctttttttcgtattgaagtataaaaaaaaagaccgaataaataaatattcaatctcttcgatttgtcatgtgagatatacaaatccatcaatttgtatatccgatatgacacatatatgatattgtatttgatttctgacactttttcacagcattttcatatttatatgaacacatgcctctttatgattctgctttatgagcttgcttaagccgtcattttccatgacaattgtcctctacagctcacttagtatatcatccatagagcgtgtaatcagatacatgtatgcctcagccatctccttcggctcgatgtcatccatgccctgggctatccatccctccgtgataaagcacaacgactgcgcataatatgtagaaatcacctccggtgtgagccagcggtatttggatttctttcctgtactcttttcgtttatgatattcataaacatctcgcagacgcacttcatggcaatctgattaaacgtcacagccccctccagctttaatgctttcttgtaaaaaacactgtttgccgagatattattgagcatcagcacaatcgcttcaaaaatcattccggcattgagcagtggtttgatgggctcaagcagctcgtttttgataatccactctatcagctcgtacttgtcctgaaaatgattgtaaaacgtggggcggataactccggccttgtccgttatctctttaattgtaatcttatcgattggctttttcgccgaaagctctataaggctctcagcgagcaccagatctattgcattcttaccttgctgtgtcattactcatcaaactccatcgtgacaaagtagcccttctccgtctccctcacatccacgacatcgccctcgcggcttttgagcctctcgctgaccacgtagtttcccgacatggcaattgcatgctctatcgtataataatatgaagtcggaagcttgctctctgttaccttcagatggtcaccgaccttggtaagtccgggtctctccatcttaaactccatccgacgcattctgtcgcctttctgttacgcttaattgtcctcttttctgtcctcgacaaacgttgcctcatactccttttgcttgttgtaagagctctcagcctttgtggcacggcttgtaatccagatattggacactccgttgaaaatcaatatgattccgacaacaacagtagctgtcttcattacatcaaatgcatttgtcacgcagattattccaaaaatcagactgattattgaaaaaatcaggccgacactccatccaccgtaaccgtattttctagcatccactgcctcaataatgctcctgatgctgtgaaaaatgagcaccagaccgatgactattggtatcaggctcacaacaacctttggctgcaccagaaaccatatgcccactgctaaaaccataagtccaagcagtgccgaaagcccgtttgtgactatgctcaaaaaatagctgcacatgtagaccactccgattatgataagcactatcgcaagcacattggccacaatcgtgagcaccgaagctctccatatgataaacaccagtcccagcgctatgcaaagcactgatgacaatagaaaatcagccttgattctgcctaaaaactccttcatacgcgacctcccttatatatcatgccctacattacttttctaattctgttcctctgcacttttcttgaccaggtcaagaacagtctgaagctcagctccctcaaccggtgcagctccatatccaagacgcttgtgatcctctgtaatctcaaccagctcagtagttttatcggccttcgcatcaattacaaaatatctgccctgtgacgcagcatcatcccacacgagataagcacggattgcacagtttggagccatatctcttgtcgggaaatcaactctggtgacattaagcgtatcagaaatctgcatagacataacagagaaatcctcctccatatatggatacatacgcttctgctgatatgcctcctcgtacagctcatctattagcttttccttctcatcggcaagtcgatccatgaactcttttccgccctcaaacatcttcgccggcaggaaaatatgctcatactgcatacgctcaaagatgacatactgctctgctgtcatctgtacagtcttgccctttgtcggtgatgtaggatgtccctctcttctggccttttccactgcctcaatcttttctacaagaggctttttgaaaatcagattgtgagtgaacgggttgaatgcgataccatcaagctttgactctttatttgccaccatattgttgactgcaagaaacggcatatttacaatgcatggtgacggatgatccttagaaagctgtgcctttgaggtataaatcggcatgaaagcctctccctcaccgtttttaataaatagcggaatcggcttgttgttctctccgacatttgcaggtaccaggaatctgctcttagtgcatttttcaatgagcttattgagcgtctccgcctttttgtcgcttgaatactgtgtcatcagcgcctcaacctccgggttttgcacctcaagagtgaaggccggatcatcctttaatttatttttgattttatttttatccatttatactgcttctccttatattaaatgcccggatttacatccaggcattattttaacacatttcttttatcaactcaacaatcttagtgtctcttgctatccattctttatcaagaaaagcgctgttggcctttattatctcatccggcgtagcccatgacagatgatactcaagccttatctcgctgtctgtcatctgtgctgccacatgctcgtccttcacatcacagaaatacacgtaggtgtgacagtaatatatcttgtcagcctcaaatatatcgcgtctcttttctatgaccttgccacactccctgatgctttccggcacgacaagaagccctgcctcctcgcgcacctcccgtgccagcgcaacctcgttggtctcgcctgcatcgatgccgccgcccagtatcttgtagtagccttcaccggcctgctgcatggcaagctttccgtctctaataataaccgcgcgcaccgcgaagcgctcaaatacctccatatcatcggaatagttgtgtttgtcaaatgtatatagcgttctcatatttatcctccgtatatgggctgtaatcattcattagtatacatggaaagtagtttttattctacaccatttgatagcgaattggaatactattatcgtccatttacctgcaaagtaacaccactgtctcaatgtgctctgtatatgggaagcagtcatatggtgttgcgcgcttcactgtatatccatgctttgtgagatactttaaatccctcgccagtgtttccggaccacatgacacgtacaccactctctccggcgacagcttgacaaccgatgataaaaatgcctcatcgctgccggttcttggaggatccattatgacaacatcagctttctcacccttttgtgccatctcaaccatgaattttccggcatcgtcattgtagaagcggatatttctgatgtcgtttcgctttgcattggtaactgcatcgcggattgcatcacggtttagctcgactccgatgacttcacctgcatttttcgctgctatgatgcctatggttccggtgccgcaatatgcatcgattacacgctccttgccggtgaggtgtgcctcatgaatggctttttcgtataaaagctccgtctgtaccggattcacctgataaaacgagcctggtgagatgcggaaggtacagccgcacagcttatcctctatgaagcccttgccataaagtgtgatgtttctgtctccgagcaccatgcttgtctttttatcattcacgttgagcaccactgtcgtgatattgggatgctttttcctaagtgcttttacgaaattgttcttcgatggaagtatcggcgatgccaggacaagcactaccattatctgccctgttgcataaccctttcttacaagcacatgtctgagaagcccatagccggtatcctcatcataggtttttatcctgaatgagcggagcatatcttttatatcccttattatctcatccgactcctgctcctctatcatgcagctttcgatatccaccacatcatgtgtgttcttcctgtaagctcccgccacaatctgaccgcgcctcgtgcagtcaaaggctgcatgaaccttgtgacgataatggagtggatttttcatgccgacaatcggctccacgaagcaaaaaggctttagcagctttttcatgtatgcctgcttgttttttagctgttccttatattctacgccctgatagtcgcagccaccacatttcttcgcatacggacatacgttaccgctttttgaccggctgcttttctcctttaccctcggctgttcggtggcatttttgtattttttctcattatgcgtggtcttttttctggaattaccttgatttcccgccatatccgtgctccttaaaatcagctatgctgactacttgccgtatgtattatataaatacacatgattatctatgcagtgccatccgcttgaagcgcctgctgtcacacatatatatgtctttccgcttgctgccttctcatagctgaccgcgcagttgccggactgatttacaaagcctgtctttgcaccgattacctcgccacttgtcatcttatcctctattcgacgcaaaaacagattcgatatgttcagattctccggatgctgcggtgttgcagccgtgctgtatgtatgatttgaaagtactgttttacaaatatcgtcctgcatcgctgcctgcatgatgaccgccatatcataggctgtgctgtaattgttctcatcatatataccgacagggtttgcaaaatgtgtactctggcctataccaagctctgctgccttctggttcatcatatcaacaaaggcctccattgagcctgctgtgtaaagcgcaagctgatatgccgattctccacctgatggcagaatggttccgttaaacacatcgcgaagcggcacctgctcaccgtctaaaaagcctgttgtgctgcaatcatgcacatatgagtaatctgtggcttctcttgtgatggtcacaacctcgttgagcttgttttctatcacagcctgcctgtctatttcggtattctcttctgcattctcttctgcattctctgtcttcgctgcagctatcgcatttttctccgcctgctctgccgcaacaagcactgtcataacctttgtcatggaagccggatacattttctcatgagcattttttcccgcaacaaccgtgccgtcctgctcatcaatcactacggcataagagctctccagctcatctccgattgtcgctgtagcctctgactcctttggtgtaaagagctcctttgcttcctctgtctcactctcctgctctgtcacaccggtcacattttctgtggctggttctgtgtcttttaccttattactgtctttctttgctttattaaagcacgatataactattataattgctatgacgactatcacagccactattcctataagcttaatctgtgaagctcctgtatttcgtctgcatcgtctgttgttttttctgctattatttctcatatccaatccctgtttcgttgtaaccattcatcccatgcacattcgcaaaaccgcactatacccgtgcctttttgttctcagtgattctgaataatcacatttcattttatactgtaacctgtttagtatactccctatcaggaagctgtgcaataattatcgcaataaacatgagcacacatccaaaaatttctctgccacctagcatctggccaagcagaatccatcctgcaatcacagaaaccaccgactcaagactcatcgccaccgatgccaccgccggatttaagcccttttgtccgacaatctgcagcgtatagcccactccgcttgagaaaataccggcatagagaatcggaatccatgcatcccatgtgcaaagcgactgtgcccactgcgctaaaccgccggcagacggtcccatatctgtaaaaatcatcactatacatgagccaagcccggtgacaaaaaactcaatacatgaaagtctgaccgcatctacctgtgatacgaaatggtcaatcacaagtatctgtatcgcaaagcacaatgcccctgccaacaggagtaaatccgagccgctaagtgaaaatgccccattcatgcacagaaaatacatgcctatcagtgcaataaatacacctatccatattttggctccgcattttcttttaaggaaaatcccaagtataggcaccataagtatatatgtagctgtaagaaacccagccttgccggattctgcgcccatgctgattccaagctgctgcaggttgctcgcaaagaaaagtgctattccacagcaggttccggctatccaaagctctttcttttgctttttgctttcaggtctgtttaccgtcagctctttcttatccagtatttttatgaccggcggaaggcagagcgcaccaataaggaagcggatgccgttgaatgaaaatgctccaactgcatcccctccctttgactgcgctacaaaggctattccccagactatatctgccaaaaacaaaataaagacatgtcttgtctttgaggctgtattcatttaataattcctccgttttataaaaatcagagatattatatcaccgtctgccttgaattgcatacttaaatatgctgttacatttcgtttgtatataaaattatacaaaaaaaggcagcaaacaccctcttcgggtattcgccgcctgtctttatatcttattgcgtaacactattatttacgctattctgccagcttaaaatgctttatctctccgtttcctgccacatagaaatcattatccttataaattcctctatagccttctgtatttttatagctcagtgcctgctgctccaaaagactaaagccgttttcactgtcatacgaaaacagatagtagtcattcgcagtaaatcctatcagatttttctccgggtcagcaagaatagccttgtagttgtatacaaactcattactccagctctcagaactgtcgataagcttctggttcacctcaaccggctttgtcggatcactcacatcaaacatagtaagctttatcttactctgctgcgagtcaccatagcctattccaagtacgtgcgtatcatcccacatatgcagatactcagagaagccactcacttcaagctctcccaaaagctttggtgctgtcggattagatatgtctgctacaaaaagaggatccgtctgcctgtatgtgatgaaatatacgtattttccaacaaagcgggctgcatatatactctccccgcgtgcaatctcgtttatcacaccgacctcattcatatccttatccagcacatgaagcgaattgacaggctggctgccggtatttgaggttggaagcacatacagatatcctccctgctcatttattgcgaatttatcgttaagataaccattcactgaggttgtctccccggtcttcatcactccatcctcaaacgaaattttgctgattttggtaagctcacggcttgcactccaatcagaatgatacagatacatggcattgctagaaacgtatacctcgccgctattattcataatgcattttgcatctatcgtcttatcaggtttatccacatcaaagctcgaaataactgtgcctgagtatgtatcctctcctatatagaagcagtcatagcttattactttgccatttacctgaggcacccatttctccagattatcctcctgcagcgccacatttttattcatatcggaggtctttatatatgtgtctgaaaaaacatataccgtattgccaattttgcgcgatgtattgtaaaatccatcctgacgcgctttacctataagcaccggtttcgtcgggtcagctatatcatagctatagcatatagtctcatccttatcgcctgcatggtttgatatgataagcatttttccgtcactgatataaagctcctctacagtatctgacggtacctcaaaatcaggacgaaacagcgtctcttcccccggctttccatttgaaatatccgtgatggatatctgaccatcctcgaccatgtaaatgtactttccgtccgtctttaccacatcactctcatcaacgccctctgtcatcacgttggtggttgaatactctgttttggctgccgcctcctgcttatttgcagacgatgcatcagacgtaattcctgttgcatccgcactctccagcaagtctccagatgcagtattccttatggaagcctcagctttttttgccacatcatacaatttcccgtaatcagaggccgattcataatccccaagctttgcaccgctctttatccctgcatagacattattctgcgcattattctgtgaaatcacatttgcagtttttgtctccagctcatctatacggttattaagccgcacaacctccgtgcctaagactgcaacaacaaggactgccgccactgtggcaagcgcttttgctgcccgtgcaaattttttgtgctttttcctgtttttgtcttcttttccaccgtgatgggtttcatgattttttacataaatttcatcactgtacccggccgattctccggtcggctgcgcttcttcaattatttggtcatcgatgtaatttaaaccatcaaataaatcctttttcgtcatagatatacgccctcctcatccagatatttttttagctctgcccttatccgaaacagtgtggtctttacgctgcttttgctcctgccgctcatatctgccagctcatcaatcgtcatgccataccagtatcgtctcacgaaaagcactctcttttccgtctccagtccgttcagaaaatccgataaacaccttccaatgtccgacagctcgccctcgtattttgcattgctgtctgcaaggcactcctcaagctcatcaagcatacagttcatgttggaatttctctttgaagcgttattccagtcaatcctgtcgcagacgatattgcggcataccctgtaaagccaggaaaggaaacgcatagggcgctccggcggtatcttgttccatgctgctatgtatgtgtcatttacgcattccagcgcatcctcatgtgctaccatagtgtctgcaaaccgggtaagcttcgctccgtacatctgcgaggtcgcactgacagcctgctggttgcgatcaaaatacatatcaagtatctgttcctgtgtgtacattttctgcaaacctcccttctatatattatgtaggaatttgtttggtgggggttacatttcatcattaattctttaaaatttcccttatgtaaactttaagcctagcctctaggaaataaagcttatagtgctgaataattgaattgtatcatatttcgtcttggattaaatatcttgttttaaaaaagccgttgacttatacacacttaatgtgtatattatgattatggaggaggcatttatgaaacaaagagagcttatcaagaaactagaggctgccggatttgaattttcaagacatggcggtaatcatgatgtatatgttcggggttcagatatagagcagattccgaggcataaagagatcaacgaaatgcttgccaaagcaattttacgtaaatggggattatagcatttataatttatcacatattatatatacattaatttatggaggatattatattatgaaacaggtatatccagttatatttacacaattaaatgataaaaaagacaccgtgcttattaatgttcctgatatgaatatattaacagagggcttcggtctaccagatgctatagagatggctcgcgacgccattggagcaaacggaatcacattacaggatcttggcagggaaattccggttccaagtgatatttcagatattgacatcaaaaacggtccctttgacaatactggtattagtcatgtttcatttgtggacatagattttgatgaataccgccgcaagaccgacaataaatgctaacttcccaaatttttcctacttagcataaaaaaaacaaaaaattcaactacaatcaaacgctagatccatttatctccttatcgttcaatcaattatttgctacaaaaatcagaagcatttcaatcagttcaccatgtcacttttattttgcgttatactgttttatataatttttttggtctccgctgccgcttcggtcggcacagagcagaggtccaccggacctcttgtggtcttcgcttcgctacggtcggtgcaaagcggacatccactggatgtcctgcacccttgtatttgcccttatcagagttcgtaaacactggtgggacgatataacacaagggaaacaataagggaaagctcacctgcgacaaatccagtgttttcaatggtttgcggagaatttaataacaaaatataacagttattaaatttcttaaaacaggtgaaatctcaatcggaatttgtagaattagtaaatctcgattttgggaaatacaagaatgtgtttcattatggttttaatgcggtttgtaaggagaaacaatatgattgggtttgttatatggtcacttttgggagtgtttataattggattaggaataaaagatatgttttctaagaatcccgttggattctgggctaataccgaaacaataaaagtaaaagatgttaaaggttacaatcgtgcgagcggactattgtttataatctatggaatcatttttgttatattaggaattccgctgttagatggtcaaaatacaccatacgttctgttgtcggttattggtgtgatggtggaaacaattgtaattatggctgcttatagtttagttatcgttaaaaagtatgaagagaagtaaataactttgaagttgcaaggaggaaattatgaaatttatgcaaacagagaaaaaacagctattgatctatgtgattatagcatacggaatcacatatgtaatgggacttctgatgtggtatagctatggaaaaggtcttgatctcagcgcttttccaaaggcgcagatgctgtatccagcagcaggtgtgatgatggcttatttaattaccaaaaaaggagataaaaatcttccaacggctttttatatattctttgtagctctcacggtggtgctggttgtctgcacggcggcttctgttctggctccccaaaatagagatctgatgagcatgccatattctcagtgggcaccgatcatgaattacgttataataggtggcagcgttattttctggattcttcttctgcaatccggtaaagaaaagcgcagatcctatggactgaacagcgaacattggaatatatctattcgtatgatcctgttgtttattggattatatcttctcagatttgtgattgcctgtgctctgagcggccagctttctgaatttggcaaaataatggcaaatcctactacctggatcatattttttactgttttggtaaactttttcctgtcagtagtggcattctttggagaagaatacggatggagatattatcttcagcctcttcttcagaaaaaatttggactaaaaggcggcgtaatccttttgggctgtgtgtgggctgtatggcatctgccaatagacttcttctattacactacgccggatatggggctggcggctctggcaagccagtttgttacctgtatttcactggggatttttatggcatatacttatatgaaaacccagaatatctgggttccgataattattcattttctgaataataatatgatggtagttttttcaggaacgtactctgcggatgtacttcagaatcagcaaatccactggggagctattcctgtggcactggtaatgaatctgctgatctttggatgggtgatctttctgaagccatttaaggagaaaaaagcataataggttcatcataattgtaatcaaaaatcaatgtccattctgtggcaaatcattaagggttgtacctataaatagtgaagaatattgtccacactgtggttgtaaaatagaacaggagcataagaaaattcaagtttgcagaactgactcaaaagagctcgaaggagcaatgtcattaagttaagaattttgacataattataaaacacatcatatttgcaattgtttgataaatatgatgtgttttttctccggctcagcttttacctcttctgaaggcttagaacttacgccattttcatcctttacgccaccaatgctcttcattgtcgggaatttttttgattgctaagctaactcttgtatatccttgcaaacccttggaaaatgggctttcccgaattctatatacttggatactcttggacgtttttttgacttttgtgtgtccaaaagatgtcattcgccttaaaatacgtctttttattttaagacatgtactgccgtgtcaaacactacaatactagatgagtatatcatatttacatagcttaattgcggtctatttagcttgtttcttgactactcaggaaaaatatttctaccctcgccccacctgtattttcagaatttgaaagtttaatacctccaccatatttttcagccacagtttttgcaaaaaatagtcccatcccataatgggcttcgccatttctacttgtgtcatccataaaaaactgctctgtgccatgcaataatgcttcttttgtaaatcctgatccgctatcctccacaatgaatgtcagccggccatcctgctcctttgcgtcaatataaatgattccattttcttttgtatgctccactgcattctgaatcacattcattacggctcggaacattggatcataagcaatcgttacctttttatcactttgttccgccttccaatctatcttctggtgatagatttctaccagtccgagtgcctgttcctttatatctgcgaaaaaatcttctaacctcaccgttgtataggtaacatcactgcaattccatgattttgtgacatctatcaactgttttacataactttgtatctgtgttgtgccgttcaaaacataagtgatattattcttctgttctgtggtcagttcagtctctgaaagtagttctgcatttccccgtacaatcgtaagaggtgttttaatatcatgcgccaaagcagacatctgttgtttcttttcctgctctgttttccactgcttttctaaagattctcgcaatgcatctcgcatatcatcgattgccgataaacagtcatcaaactctttgataccggaacaggatgtctcatattccagattttgatcctttatttgtccgattgcgtctaatacaggctgcatctgctttttgattctttttccaaaacgtatggacggaatgatgataatcgctaccgctccaatcacagacataataatcatcacattctgtggtcctataaaatgctccctcaaaaaagctgaatgatattgaggtgtcaggcgatattgcaatacaacatattcattttcccttacaattactttataaaaatatttcccggatgcgtttccgtgctttgcaacattccatgctatctgttcgtattgttctgacagatctccacctattttctctccattctctgaaaagattacataatcacaaagtgcgggaatcatctcagcagtcactttatctgcacgtagaatcgtatcatatgcttcattaatcttttgctctgcataatttgccggataaatacagcccacactaatcaaaaggtacagcagcagataagcaacaatcaccaaaccaactaatgatccaagcatgaccagtacatatctcataaaaatcctgctgagtgcattgcttctctttactcttcccatttatatccaatcccccagactgtttttatcggtgtataatcataatccgcaaattttgctcttatatttttgatatgcgtgattatagtactgtcattactctcattgtcaaagccaaagaccgcttccaatatctgttccttcgagaaaacctgtcctctgtttttagccagaaattcacagatttcgtactccgctttcgtaagaggaagttccttatcatcaaccaatagtttcttttgagatatttgaatacagaccctccccaaaaccatccggacagaatgttccctgtgctctcttctaagatgtgcattgatccttgcccgaagttccatcactccaaatggctttgaaatataatcatctgctcctaaagaaagtccgtttaccagactgttttcctccgtttttgccgtaagaaacaaaatcggacaatccacaagtgccctgattcttttgcataattcgaagccatcaattccaggcatcataatgtccagtaaaatcaggtcataacgatgtaattcttccatattaatttttagtggattacttactttggtaaccagatgtccatccttattcaaaatgctttctatcatttccaaaattgccagttcatcatcaactgccagtatttttgccatagtttccctcgattctattccgatattctgtttccttcccagtggtttacccaccaaaaatagtataccatactaatccctgtaaatattaagcaacctggtatgaatgacaaccattcacctacactagtttctcccaatacagattgcagataagtatatggtactctacccgtccagcagacaaatacatatttccacacataatctccaagtccggtaagcatcaatgcactaattagtcctgatataatccctgctccaatggataccccttttccaaactgaaaagccagaatcagctgccacagataaagtggaacactgcttccccacagcagcaatgctgcaaatatacatcctttcatgatttcgatatcgcttgatgcgattcttccaaatccaattccgaatatgattgctgtcaataggatagagcacagacacaaaaccagtagcatcaacagtttcgataaaaatgctgcaggtttatccggtaaagacaacagattttgaaaatcacctgcattttgttcctgttccatcacacttgctgtaaaaattccaataagtaccggaagtcctgctcctattgcctgataaaatgcaatcactttcatattttcattccatggtgaaaaaaagtaatatattaaaaatataacgctggttataatcggaatcagtaagtgtgccagaatcacagatgttcctttcatctttcgcaagtctgcattaagagctcttccaatcatcttatttcacctctcttctctcaaaccatttcaaaaacagaaccgttacaaaaacaaaccagatgattgagagacacattcccggaacaatgactcccgtatccaaaagaggattccctgcttctgcggcaagtccatttggtaaaacatgaagcaacgggcacatcattcgcatagggattgcagaaacaagtacataccagattctggtttgtgatattatcacaccgctgacggtaataaataggcagacgaacaggtttacaatcattccaaatcgttcacttaaaaataaagctaccggaatctcccataactcagaaaccgtcagaaacaatactgcaatcaacgctcctttcactggaacatgtgtcgttagaagaaagcctccaagcgttgctcctgcaaacacaatcacattagaaaacaaaatcatgtacccaatataaataattttccccagcaacaattttcttctgtctgtgggaatagtcattaaatgatagtattttatctttttctcctgcgccacagaaagataacaaaatagagcaatcatccccggcagcaaaagtgtataccaccagttccaaacactttctgcataagcatttgtcatcccaagagtaaatataaatgccatgacaaatgtaagaagaggaaatccccagataaacttttttcgcatggttcttttggctttttgatgttctgcttttataatattaaccatggatttcacctgctttctggttttttcttaccacattcataaacaaatcttcaagattatctccctgctttaatgctccttcgtatcctaagattccacctgaaataatcccgactttatctgcaagtaactgtacctctgagagaatatgactggagagaattacagtgattccctgttccggaaaagaccggatcagctctcgtaattcctcgatgcctattggatctaatccattcgtaggttcatccaatatcaaaagttccggttctccaagcaatgccattgcaatgcctagtctttgcttcatccccaaagaaaactgtcctgctttcttctttccggtgtttgtaagtgatacaatctgcaagacctcatcaattctgttttcatctgtaccaagcaataattgtcttaccttcaaattctctctggcggaaagattttcataaataggcggattttcaattaacgctcctatttttgataaatctttcctatccaaaagttttccatcaaagtaaatctttcctgcagttggtttcatcataccggtcatcattttcaatgtggtagatttaccagcgccattcggtccaagcagtccataaatctgtcccttttcgatattaagtgaaacattatttaccgctttctgttttctaaaatatttacatagattttgtgtctgtaacatcatttccatctttactatccttccttctatatttcatttcttactgaaatataacctaacagaaaaaaataaagatttgatgaagatttattcccgtatggaataaaccatcaattgaatatcattatcagaactcggctttccactgaaatcagcaaagctgttacaaatacgaagtcctaatttaccgaatatctccttcaaaaatctgtcccggaagttttttcttctccatatacgggaactctctatcaaatgcctctgcttccttttcatttaccagataccctgccggaggtgcatactctcctgtaattccattaagatatcccggtatcagttctttgcacagaaagaaagatgcatcctccccttccggcaatccatgatagcggatatcgggcatttttctccattggaacgagccttaacgcttgcctgccattcgtgaccgcaagtacctttccaccatacttttttatttgaaccgaaagtaatgccatcaggtgtaagcagtaaattcttctctgaccactccgaaacaagctccgggtgtacttctgctaaattgttgttcatagccaaacctcaacctccttgtgcttagagtatatgaagttttggctttatcttgtagtttgcgaatatccgtataaatagaaaaagctctttgagaaaaggatttttcctctcccaaagggtagtttaacttttacttagaattatcttttttaataactaagttataattgctatcataatacagtccaagttctctacacattctatcgttcacattatctaacgctttcttatattctgcatacgttggagacagaaccattaaattaggaatgaatatatcgttatatcctttattttgtaactctttctgcatttttctctgtgtaataaatgctggatggtatttcattataccgtttttcattttagcacctttccatactttttcttttagtctttcatattcactttcactcatatcacgataataggctatcatctcatctgcggttctggtttcttgtgcaatcccacctatcatcttcgcacctattcccataataaaaggaactttcaatgtcgtttcatcgcaatattctaatatattctgtagtgcctgcttctgttccagagtcttcaaccttacattaagaaatggtttgaaatgacttttaaaataatctccccattcttttcccggtagcaaagactcaattgcattttcaacggtttgataatcaagtgcctcatttgctttgtctgcgtcaccatcatctataaattgcttcaaagcttcaagttctgagtcttttaaaactttttcctgcactttttcttgataaatacgaagaagaatacttttgtcgccagtttccaaaaggctctgtatgtctttaatactaataccgagttttctatatactgaaatcttttttaaagtttcaacatcttgtgcagtatagttacgataaccattgttatctttatccactgacagcaatcctttttcttcataatacttaactgcacgctttgtcattccaacctcatttataatttcatttaataacatccgatgcacctccttatgatttatgttgatagtataagcgtatacgctgcgtgcaggtcaagagtttttcgtctttcttctaaaaatgggcaatcccgatttcaggactgcccattcattctgctaattatgcgattttttcttgcttgcaccgatttctgcataaattgatgtaaatcgctgtttttttagttttttatcaaatgaagtacgtcccgtctattttgtaaaacggtacatctttacatcatcttaatagagctttgcacctgccggaatgtgatcatcaaccataagaagatgaagttcttcatcctctgaatccttaagattgtttactgctgaaagtaacataccgcaagattaatggatctagcgtttgattgtagttgaattttttgttttttttatgctaagtaggaaaaatttgggaagttagcattaagaatattagtcaatacagtcggcaacaaattgaaaaaagcatcaaatgccggtaatactcttgcgataaacggtatcatacaaagcaggaaaaacgggatacaaaccgccagattcggtgtatgcatcttaactgtcaccagcattgtcagtgcagcacaaaacatcgttgcgatatatccgcccacaagtatcagcaaataatattctccatatgtcataacataaatactatatggatcatcaatctgatacggtgtgaaaaatccactcgttcccattactgcaaatgagataagagacaatatccctactccgatccaatagataaccgttgatacgaagattcctgcaataatcttgtttttgattgccttcgatctaccatactttgtagcaaaaaaaacatcctctgttccggggcggaactctccggaaaatataccggctaccaaaaaacctatgatcactgccattaatagtacataagtttgtgcgtacattgtcatcgtagcccaggaaccttttgcttcgaacgtaaaaggtatttctatctttttataaacgttttccagataacttctcttttcaggtgtggttccgtactcttctgccattttcttcatattatcttgatagattgtatagatgtcctgtaattgttcatctgagagctgatacactgcaccttcattccattctgaatccggagtcaatacgccaattacaaaactataaatatcgtaatatgactgtactgttttaccatattctgtattaggtatctcatcttgatacttagccgataatgtcttgtaatcatttatcacttcggaaattttctccgttgtaagtttccctttccattgattgacatcttcagccagaagccgtcccgcgtcaatacctgtgtggctctgtccgtctgcatccgtatagctcatactcccaattgccatacctgaataaataaccgtcatcacaagtactgccgcaagcagaaccttattcatcctctttgaaaaaatctttttcagttcatatttgaacatcatctttatcacctgccttttctccaaaatacagaagaaatgcatcctctaatgttgcctccacctgtactgcatttccggtcggtggcatctttgaaaggactctcaactctactccatcagaaactgtccttacatttccaatcagatattttttcatataattgttcaactcacttttaggaataatgcaattccacacgaacatatccatagacaaaatgatctcatctgaagtccctgtatagaaaaattttccttctttcattaatataatctcatttgccacatattcaacatctgacacaatatgcgtagacaacagtacaagacgatcttccgacaattcactgatcagattacggaacctgattctctcattcgggtcaagacctgctgtcggttcatccaacacaagtatccgcggatcattcaacatcgcctgggcaattccgaccctccggatcatgccccctgataaagtccgcatctttcttttcctcttttcagccattccgacctgctccaacagttttaatgcccttttctttgccatgatgggcctgattcctttgatagatgcaatatacagcatgtagtcatacaccgaaagatcaggataaaacccataactctgcggcaaataaccgagtatttccctataagatgcccccagactaaagatattctttccattccacaagatttctccgcttgttggggttatcgctgtacatatcatccgcattaaagtggtttttcccgctccatttactcccaataatccatatacacctttccccatagaatgtgttacatgttctactgcgtgtacattcccataatcttttgttacatttttaaattgcagttccactcgacttcacctcccagtttatttcacagttacattgcgatttgtgaacacaaaaaataagataaccaaacgatatgatcaacaagctcccccagattggcatcgaaatcctctgataaatagaatctgtcgatacaatcagtgtccagataagtatacatgctatacttaggaaaacagcaatatactccatatcattccatttgctgtacaataaccggaagcagatacaacaggaaacattaaacggcactaagaaatctatgatgagtcggtatgccgaaatctgtaatgtataaactgaaacaccgaaaaaaaaggtagtcataagtaaatccaccactgcaaacagcaatatccttgcagcacagatctggcgcagtgaatagaatgctgttttttcaatttccactgctgaaaagctccgattcttccaaatttccggtatgatcattaccgaaaacatcactgacatagcccccagtgttctctctgtatttgctcccacatccgagtccacaagcagtatccaaagcagaattaagatttctccttgcagaacccaccatctctttttgataaatttgaactgctcaaataaaaattcaaaatatgatgctcgtctgttatcctgtctgttcataatgtctgaacaccgctcttttactgtgtgaacagccgtttcccgtatatattccttctgtatcaaggatttatactcctcgatttttctctgatattgcttcataatttttccacctccaactgttttgccagcaattcttttgcctttgaaacacgatattttacaagcgacaattttatatttaataaatcagcaatttctttttgttttaatccctgaaagaaaaacaggattacaatctcttttatttcttccgggagctgctccagagccctctctatatcaatccggatttctatgtttttcggattctcatcttctatatccggcaactggtctgtcattatttccttctttttcttgtaattattctttataatattccctgctatgctatacaaatagctctttgtcttcttgatctctgccccgcttattagtgctccgaagaatctctcaaaagtttcctgtaccatatcttccgcatattcctgattatgagtatgtaaataacaatattgatagatagaagaataatacttttcaaccaactgattacctgcttgattgtcaccgtttctgattttctgaactaataaaaaatcagcaatcatctcatatcacctctcttgtcctctataataataagacaacttaaggtgataaaaagttagtgaaaaattaatattcatttaattttttataattttcacctcagtgactcgatatattcctccagacacaatcctttttcctgcatttctatggcagattccacccaaaagaaatatctgcttctcttctaaatagattgaaactattaatcattggaatttcatcctgaatcgctatatacgaaacagcccgcaaaaaggcagcaaaaagagtcccccttttgctgcctgcaaacaattttgttttcaatttaatggtatcaagcttgtacttgacaaaatgaaaaaacatgagttcattccgactaatcatcttacagtaacatagtcatataaattggtatatacataattccgtcctgatattttaaatccttcgtataaataatgaatctgttctcacactttaactgatatttctgaagcagatagtcaaatgatttgtgcgacatatagtttgaagattttacttcaatcggacatatcttctttttcttcacaatcataaaatcaatttcatatttcttttctctggtcgttccctccggcacgtacaaatattcatgaaaatacaactcatgtccagctgctctgagcatctgtgctacaatattttcaacaatcattccctgattaattcccagattgtctataatcagagccttatataaatcttcatctatactgtcccggttcttcataatctgtgtaaccaatagtccggtatcacccatatataatttgaaattgcttctgtccgcaaacagctccagtgcaacctccggttttgtcacattgatacactcatttcctatcattgcttcagaaataaagctgaccgcatccatataattctgataacgcgcatttttatctaccatagaaagtttgaaatgtgaatttttattctctagctgctctggtattgttcgataaataactgacgctttttccctgttttctgtatcgtattttgccagatcctcttcgtaaaggctcagaatattccgtttaacaaaatcaatttgttcataacttttccctgaaacataagcatctactgcctgcggcatcccacctacaaccatataggtacgaaagcttttcataattctccggtgaatcgcatctccaagtggctttcttttttcaaaagcttctctgatcgtaggaattgtaacctcatcattgattgcccataaatattcttcaaaatccatcggatacatcttaatccggtactcttccgaaggaatcagtatatcctttacatttttccggattgagattagcgagcctgtctcaatatattcatatcgaccatcagcgacaagatattttatcgcctgccgtgcctgcggaaacaactgtacctcatcgaaaataatcacgcagttcttcccttttaaactttttcctttcagaagaaataagtttctgaaaaaagtatccagatcattcatgttctcgacaaaattattttttacatcctggttttctcttgcaaaatcaagaatcatatagtcatcatattccttttttgcaaactcctctacaatggtacttttcccgatacgtctagccccttcaagcaatactgcagatgttcctgctgccaatgttttccactcaatcaatttggcataaacttttcttttaaaaatcattccgcattcctcatttcattttacttggtagtattatagcatatttccacctcaattctaccatttttcacgaaaatgcaaaatgtttataccaattttttaacgaaaaacagaaatgtttatatcgagtttttaacgaaaacacaaaatgtttgttgtttcatttcttaaatgcgttattttcccgtttattcgctcttttgtgtcaggcaccaatgtatccatatttacttttccttcctgatacgctttctcaccggcaaatccaaatcctgtagtttaggtccaagctcatcatccataatatatgtattaaaaaaggttcatcttgttaatcaagatgaaccaaacgtttaaaaattctatttgtttataaactccttgcctaatactcaaatgaatcctcaagctgatactgtctgtctccaatgcgttccatttcatttttcattttaagattgtccatttcgccggtttgacacacatatgtaggatctatataatatgttgaatcatctactctcatagcaacccatccatgtggtatgagtgtaccatctgatttaattgtaccaaaaacaggataagctgttattcccactctgttacataattctgataatattattgagattccaccgcatatacctcttttatccaaaatacatcctttgtttgagacatcagcatatacttcattttcatacaatttgtcataatatggttcaatacttgattcatagacagaataatcatattccatgttgtcttttatccaatttaagaaatattgtacagcctctttttcattcatattcttgggcatttctcttataatctcatcatagcaagcatctatttcttttgatttttcctgataatattctgttgaaaaatcagcgcttttacatattttttcaagctcatctatattggtaattatattctcatcatttaaaacaagcttaaaattcttcaactccttgcgcttttttgaatcattaaccagaacatacaatttcataatattacaatcatcgttaattgtgtttcgatcaattagtttattattttctccaaccgggaaaattagtgaaatcgcccagttctgatattccggatcaaatgataatgttcttactatcctcagataccggtatgtacttatcggagctgttagatcaatttttccaccatttccctgtgcaactaatgctgtaatatcgttacatacccttttttcggtttcgtcaagctgatcataataaaatgaatttgttttatttgaaaaactcaccttattctgaccaccccctattccaggctcttctttaccatttaaaaaaacacataaaataccgattaatgttaatataaacagaaggattattttctttttattcataaattatgtctccctttagaaattaaacctatcatcatacattttcaatactttaatgctatttggtaatgttattcccctataaccaccttacagttcttctaatattggtcctataaatgcgttatttccggtttattcgctcagaaactcagccaccttttctacttgcgcactattgtactccatgtattccagataatactttttcacggtctcattctgcacttcttttttatagagccactgtcttgttttagcctccggtgcaaacagcactgcctgatattgtggagaaaatatctcatcaagactgcaggctgatttgtccagcacgcaattgtagtccatatttttttccgcaaaataccgattcaatgcttccgcaaacttttttgcttttctcacatggacagcatattccaccggattatacggctctccttctattaccggcacctgccatactaaaatacattttttcatctcttttggtcctttcatttttgccaaatttatatctaataaatttaagactcccatactagattttgcctttttctatacaaaatcccaaaaattattatatagctcatgttctatttctatatttcttttattcttccacccaattaccaattaaccaaaaattctgtaaatatcggtacctgctccatatcctatattgtatagcataagtccaattatccctataattaatatgtttccataagttttatgttccatataccagctaatgatttcttgcatgtaaatcacccctttcaatattctggtctgttcatattattttgttaacattatttttgttaatatcattccagcaccaatcagattccaagtgccatgtattgaaatatttatccagatatttttgtattttttatagataaatcccaaaaatagtcctgtcaaaaaatagtctaaccattgacacaaaaatagtagtatatttgtgtttccaaatgaagatctacaattgacctgtaagtttactaaagaattaaaatatagagtcatcatgtgaaaataatatttctttcaattgtctcctacctattgttactgttttcacgaagcgacttcatttcctgaaaaggagttgatatcaccatcatcataccagataaaatcattatgctagaataaatttcattcaaattaaaacatgccataatcatagccaaaatgacaaaaatggaacaaatcccaagttgaaaattttttacttttccctttttatctttttttagcttaaccattaaaaatcctatatccaataacatatagaggattaaatctacaataaatagaaaaatacttaggtctttttcaaagcaaattgctaaaataatattatataatcccaaaattgccgaacatactcgggttaatttaacatcccaaatcacatgtggcatcttccatttaaaagtagaccaaacaatcaaaaagcaaccagaaagcaatatcattgttctatttaattccataaacttccactcctattgttatatattttttaccatattccaacattaaaacatataatatactacactacaccattattcaacaatttattaaaaatggaaaaggagaattttactatttggcatgatttcggtgccatttgacccaaactactgttatggttaatttatatctaataaatttaagactccaatactagatattgccataatgacaccagcaagcattataccgcataaacatgccataatgctcttcttaaaatccattctcaatatactagctgcaagtattccagtccacgcacctgttccgggaatcggaatacctataaagagtacaagcgcaataaacaatccccttcctgcggtatcttgcaattttcgtccggcactcttgcctttttctatacaaaatctaaaaaattttcctattactttcttattttttccccattcaagcagtctatgcgaaaaaaggtaaacaaacggcattggaagtaaattttccaatatgcatatggcataagccggtaaaaccgacactcccatagcaattcctgttggtatcgcaactcttagttctgccaatggtatcattgaaatcaaaaaaattattatatagttcatattattttgctaacattatttttgttaatatcattacagcaccaatcagattccaagtgccgtgtattgaaatatttatccagatatttttgtattttttataaataaatcccaaaaatattcctgacaaaaaatagtctaaccattgacataaaaatagtagtatatttgtgtttccaaatgaagaaagcatatgcattgttccaaacaaaaatcctgtcaccaatactgcacacagttctccatatttgctgaaaaaccgaaacaatatacctctataaattatctcttcggtaaaaggtcccataattacactcatgataacagccaaaataggataatccacaaaatatccattaacgtttgactgatttgccggaaccgatatatttgaacacactgtcatttcaatgattctagtgatgcagcttaacaagaatgcaattcccacacctgccaaaactctttttatatttacagaaattctgtcagctttgaattttttaaatgaagtgatcaaatattgcttcattgccactccaatcatgataattaaagtcaactgataaatcatatttatcagcagcccataaaatatatttttttcttttaaagtagaaataataccactagctcctatgagcataaaacaaacatgaattattacgactccaactattagctttttatgattcatttcagttgatatataattgttttcttttttcatctctttgtactcctcattttttcccaaatttatacagacatctttattaaattttgaagctttaacagtgttatcagtatctctgtttgctatacatactaccaccataagaaaaaacaaacaatatatatgtgctatttggcatgattccggtgccatctgacacaaactactgttatggttaatttatatctaataaatttccatcaccaaacaagcttttaaaatgcggcattcattgattaaccaaatacattaaattatgcatcaaattgatgctcatatgagctgctatcccaaaaacaacatttcctctttttatataaaccagacaaaacgcaattccggctaatacatattgtattgcttgcagacaaagctcatttaaacttattgcacctatagatggtataaaatgcattaatccgaataatactgatgatataatcactttgattatcagccttttattgatagagctgaatataaaccatctaaaaatcaattcttctaatattggtcctataaatgcagaaagaatcataatagcccaataatgttctttcattgtcattctgagcgtaatttcatttatgctttgctcattatttccggatgacaaaataaactgcataataccacctaatattgtaaacaatactattacagcaaatgatttgatatatcccgaagctattgatttgatatcatactgtcttatctgttttatatctcttaaaatccctgttccataaaggctgaataaaataactatagctataagattccataaatagtttgttatcagatacgcatccgaataactcattgcttcaaataccgattgtataacaggcaatatgatatatttttttcctatcaagtaccaggccggaaagattatccagccaatataccatttattgttttcttttttcattaccatttctgctttcattgacttttattctgcaatgtttcttttttgaaatacagaaagagctatcaatgaacacgtaagaataactattgctgaaacaacttctcttatatcttgcactacaatgactaacgataaaatttccaaagtaatactgatgcagcatgcagttctaatgatttttgcgttttcattttttattttatcatatgataatttccccacccatacaaataggacacagaacagaacaacatctaaataatgtccctttttcacaatattaaagaaatgtaatattcccatcaaaaatgcaaaaaatccaataatttgcatagataatgtatattttttatgttcttcgaaataactattttgaaacaatataggcacaataattatccatacaccacaaaataacaatagtctttccatattttacctcgtcttattttataaaattatcttgttgctaaataccctaagcctgctcctgttcctgcaacttcacggattttacttatcccaattttatatccgttctgtctgcagattgttgcaagacatgccgctccacagtcggttatatcgtgttgttttatacaatagtatttcgtcatttattgttccttttcgctatcgctactttcaatataaatgccagaaatatgttctggcatttatatcaatatcacttacttaatcttttttatcagatttagaacccaatgctattcccaaggcacagccaaatgaagttccaattggcaacatcactatattgtttgttacaacactaattgctacaccaattgccgttcctactgcaacacccattggaagcccaacttttttattcatagcattgttcctttctattttttcgactaactccagtggctatgccgcctgcaaagccagccgcaacaagcgtccaaaatatagcatcatctacaccaaatattccaccttctacatcatataattcttgcatacttaatcttttaaagttgtccattttgtttcctttctttaaccagcaaaatatcctacaatatgtcctaatgcccatcctcctaatagagctcctgtataaatgaataccggtgctattcccttatttatctttgcatattcactatactcttttatacacaaaaaaagcaatccttatggcatgaacgacactttttaggtatgaacgacatattgattacttttttatataacttttttcctattattatatatttattgttacaataaatctttcattttcctaagatattctcatatctccatcatatttttttacagttctccttacattttctaacccaataccatgattcagcttatcctcttttgtagtaataaacttttgtttttgatttataatactctccatatcataactattacgaaccgagataaatatttgtgaattataaccggctatctcaaactcaattattcttttgtcctcttgtattttttcacatgcctcctttcgaaattaaacctatcaccatatatttaccatttcaatactttaatgctatttggtaagatttcggtgctatttagcaataaatcgtaaaaatactttaatctttgatttacggctggtatttattttaaataaaattatttgtttttcctatttaaagtgatatacctgtgaccaggaaaaagagcgtatattgattgatttaagtgagttgtataaataaaagagtactacatttaaatatgtttgtcataactggatatagcttcaaactatgactaaccgcaaaagaaatgtattatacaaagtcatagtgacatggtaggataaccctagaaaacgaacagaaaaacacaggaggttatcaatatatgagtacattaaagacaccatttcgctatgattttgtaggaagctttttaagaccagaaaagcttaaagcagcaaaaaaagcgtttgaagaaggaacaatcacacaggaagaactcgaccgcgtgacggatgcgtgcgtgacagagatcgttgcaaagcagaaagtagcaggataccatgtgattacagatggggaattcagaagaaaattctggcatctggattttatgtggggatttgaaggagttactcatgaaaaagatggtggcggcatacagtttaacggagagatggcagaccttgaggctacttatctggtgggaaaggtaaaagcaaaggtgcatccgtttgtagagtatttcaaattcttaaagcagtttgaagatgaacagaccgttgcaaagtataccattccggcaccggcgcagatgtatcagcagatgatcgttccgcagaacattgagcagacaagaaaattttatgcgacagatgatgaattgatcgaggatatcggtaaggcatatcaggatgtgatcaaacagttctatgaagcaggatgccgtaatctgcagcttgatgactgtacctggggtgcaattgtcggagatgctgcaaagcagagataccagtcacttggtgttgatattgaagaggtaaaggcacggcttttgaaagtaaataatctggcactggaaggaagaccggaggatatggtgattacttcccacatttgtcgcggaaattatcactctacattttttacaagtggaccatatgattctgtagctgactatgtatttgcccaggagcatgtggacgcattacttttggagtatgatgatgcgagatccggtggttttgcaccgcttgcaaaagtgtctccggacaagaaagttgtacttggacttattacaacaaagaaaccggaactggaagataaggataaggtgatcgcaagaattcacgaagcagaaaagtatattccgcttgagcgtctatgcttaagtccacagtgtggatttgcatcctgtgagattggaaataagatcacagaggagcaacagtgggcaaaacttgcacttgtaaaagaaattgcagaagaagtttggaaatagaatattgtttcacgaataaaccccgtatagattgtctataatagaaaatctgtacggggttttctggtatatctgcaacatctttacacatttcccaatcaaaaccagcttttctcttgggatagcttcccatagcttagtttcaaaagaatcatcacttaaacacataaacgattcttagcatttccataatccatgcaggttacaatatgcatatacttcttctacctgctcaccatcgcaaagagagaaatctgctaccggctcctgtcccggagttagctgctttctgtaaataccctgatttgtatttaatgtaatccactcaatgaaatgctcttcaagcattggatgttttgtctctccgaccacgacatgaacatgactgccttctatcgtatatacaggtacatgcttctcgacagcagcatctgtcactccggcctttaactcgtgcatagcctcgccacaacatattaccggcacgcccttatcctttaccatttcaataatatttccacagtgattgcatacataatattttacttccatcttttttctccttccatgtgtaaaaaataaaatctaaattgcttctataacttttttaagaatccgccgatccattaagctttaatgcttctttggaattatctcatatctttaataattctcttcatgtacttcaaaatagctctgaggatgattacataccggacatacatcaggagcttttgttcctaccacaatatgtccacagttacgacattcccatactttgacttcactcttttcaaatacctgtgaagtttcaatattcttaagaagtgcacgatatctttcctcatggtgcttctcaatctcacctactgccctgaattttgctgcaagctcagggaatccttcttcctcagctgttttagcaaagccatcatacatatctgtccactcataattttcgccttctgccgctgccgccaggttttcctttgtatcaccaattcctgctaattccttgaaccacatctttgcatgttctttctcattatctgcagtctttaaaaacaatgctgacatctgctcgtaaccttcctttttcgctacagaagcaaaataggtatacttatttcttgcctgtgattcccctgcaaatgcctcctgtaaattcttctctgtctgtgttcctgcatatttgttttctgccatctcttttacctccgttttctttactactttttcaaaatctgatgccgggtgcttgcacaaaggacatataaagtcatccggtaattcctcgccaacatattcatatccgcaaattctgcaacgccatattatctgaccgtcctctgtttttccaacctcctgtggcttaggcttaatattattctgataataatcatatgtagctgaaggaatattacttattacttccatatcggttatctccccgataaacattgtatgtgaacctaaatcttcagttttattaactgttacagaaatgtatgcatttgttccttctgtaatataataaataccattttctcccctggaacacttttcaaatgtttcaaacttatttgtatcccttcctgattggaagccaaaatgtttaaacaattcaaactgtgcattctgactcaggactgatactgtaaattttcctgttcttacaatcatatcatgcgtataatttgccttattgacgcagatacttaactggtttggttccgaagctgcctgtatggctgtattaataatacatccattgtctttttcatcttcccttgcagtcagtacaaacaatccataactcagcttatacattgctttcctatccatattttcctccctttatcttctccatgtattttaaatggtattctctaaatagccatttattcttattaattaggtttaattggccataattattatatagtattatagtactttagtcaatataaaacagtaatcattcctattttataaatttaatattatcctttatttccaaagaaacgcaaaaaatcaggtttaaaattcattaaatatctagtatttatgtatcataaaaagtacagcctatttattgagaatgcttattttatctgatacaataaggaaaattgagattttattttataaggaggaatcaataatgagaggtgtcgaaacccgaattcaggaaatcagacataaaatctttactgaggttgcacgtatggcttatcatacagaatggcctgttaaagaacgtatggaagctcttccatacaagattattcccggcgaaaaaggaaatttcaggaacgatgtatttttggagcgtgctatagtcggagagagacttcgtctggcaatgggactgccttaccgcagtgctgcagagcattcacctatatcagatggaatcgaggctgccgacaaagatgaaacctactatacaccgcctcttatcaatgttataaaatttgcctgtaatgcatgccctgaaaaaagagtacatgttacagacggctgtcagggatgtctggctcatccatgcatggaggtatgtccaaaagatgccatatcgctggatcgcacaaccggaaaatctataattgaccaggaaaaatgcataaagtgtggacgctgtgcaagcgtatgttcatataatgcgattattgttcaggaacgtccatgtgcaaaggcctgtggcatggatgccatttcttctgacgaaaacggcaaagcaaatatcgattatgacaagtgtgtttcgtgcggacaatgccttgtcaactgtccttttggtgcgattgctgataaatcccagattttccagactatcagagctatacagtccggtgaaaaggtctatgctgcagttgctcctgcatttgttggacagtttggtccaaaagttactcccggaaagctacgtgcagccatgaaggctcttggttttgcagatgtatttgaagtagctataggtgcagatctctgtgccaagcaggaggccgaggacttcctaaaagaggtacctgatgaacttcctttcatggcaacctcatgttgtccggcatggtcagtcatggctaaaaaactcttccctgagcatgcaaaatgtatctcaatggcacttacacctatgacactcactgcacgtcttataaagcagcataatccagatgcgcgcgtggtatttatcggaccatgtgctgccaaaaaacttgaagctatgcgacgcagtgtacgaagtgaagtggactttgtactcaccttcgaagagatgaccggtattttttccgcaaagcatgtggaccttgaaaatatcgaggaagaccctgctggtgtcagcgatgcttcaacagacggaagaaacttcgcagtcgcaggaggtgtggcacaggctgttgttaatgtcataaagcgtgatcatccggatcaggaggtaaaggtagcaaacgcagaaggtttaaaggaatgccgtcagcttcttaaacttgcaactttaggcaagtatcccggatatctgcttgagggtatggcatgtcccggaggttgtgttgccggtgctggaaccatgcaggcaattaagaaatcacagacttctgtcggattatatgcaaaacagtctactcataaaacatcaagtgaaactgagtatatcaaggagcttgacaagcttgtagattaatatcaataaaaaagaggatatatggatatgtataaatccatatgtcctcttttttattacaggttatcttataatataaaattagtaatagttattattttcaaattatattctcttgaaaacttaaaataattatgctattttgcgttcaaaaacatatttactatctgatgataaatcagacctgaatatataaccaagcctgtcaaacttttttatatcatcaggattttcaatatcattttccgccatgaatcgaaccatctcaccacgagccatcttagcataagtaccttttgttaccagtttatttccagcttgttcgcagaatgaaattgtaatatatttatccttcggtgtaagatacttttctatgcatttagaatattcctttgatgcaagattaattataattctgctttcatcaattactgaacgatacagcatatcatgccagtactcatacagattttttgcatctcctatttctacctttgcctgcatttccaagcgatatggcgttactccgtccataggttttaaaacaccataaaaagctgataatattctcaaatgattttgtacatactcaaactgactattttcaaacacggatggtgccatatattgaaaagcaattccttcatatgataaaacagccggtgtaagcctgttataaagatccatattttccaatctgttaaagttctgctctgcaatcttgtcattacatttccagatagctttcagttcttcttttgatttgcttttcatccagtttaatacttctgctgtcttatcaatatagacaggcagttcaaccggtgctaagttatcggtatttacaatcatcttttttgcaggtgataaaataatcttcattatgccaattccttaagcatattttcagggtcatctgccgccttgactttatcatttgcctttataatgattccctgctcatcaataagatatgtagttcttactacacccatagatacttttccataatttttcttttctttccagacatcatatgcttcaataactttacgctccggatctgctaatagcgtaaatgccagtccgtatttttcttcaaatctcttgtgagacgctacagagtccttgcttactccgagaataacagctcccttctcagtaaactgtggataacgctcagaaaagccacatgcctgcttcgtacatcctggtgtattatcctttggataaaaatataagattactttttttcctgcataatcgcttaatttatgcatttctccgttctgatccggcaattcaaaatccggtgcttttattcctaactctaacatttactattcctccgcttttgtattttccacctgttttcttgttcttttattacctgaaatcattttatgaccagaatagactgccataatcatgcatatcagagagccaaatgcaaagtatttgtgtgctgcttttaaccctttatatcctgtataaaaagttccaaccattgtaactattgctccgattgaccaatatttatgtgctttcattttatacctccaaattgattaagctgtttccaaaataaatatctctggatcattaacaatattatacattccatccattactttcgacaagtagggaaagaaaaataatcattccaaatacaaaaggatgaatcacgataattctggcattaccttgacgcatcctttcgtgttgtatttttttattcttcttaatgacagctatggcttccgcatccatgctcaccacacgtttgtccttccccatggttgtgctcatggtgagaacacttcacatccggattataatcaagcgtatcattgataaaagcttctactgctttatccgcatctcctgaaactccgccaaaaagcttaatgcccgctgccgctaacgcagtctgagcacctcctccgattccgccgcagatcaaaacatcggcatttaaggcattaagaactcctgccaatgcaccatgtccgcttccattcgtatctactacttctgaatgtagcacttttcctttctctacatcgtaaatcttaaatgtctctgtgtgtccaaagtgttggaaaatctgtccattttcatatgttactgctattctcatgataccttctcctttttctactgcatatttttgataaatctcatgtttgtaacatcctccaaagctgcagtcgctgctctgaccgtcacatattatgaaatccccaccatcaattttaagcggatgtccatcaatgagagcatctgctattttctttctggcaatctcgtaaatccgttggaccgtcgttctagcaatctgcatagattctgcacactgctcctgactgtaacctttcttgtccaaaagacggattgtctcgtactcatctaccgtcagaacaatgggcatttttttctcagtatcatctgccggaagaaattctaaaacatttgggaaatggcagacttttctgcattttaccggtctcggcatgaaattgctcctttctcgcttttcttatataatagtcctataaagggcatatgtcaattattcgattgacgcatcttaaaaaagcaagtatactatgttcataaaggagataactattatgagcttcgaaaattattttccactatggaatgacttaaatacagcacagaaaaaactaatttcagacaatttgatcacacagcatgtgaaaaaaggaacaatcattcacaacgggaacatggattgtaccggattattactgattaaatccgggcagcttcgaacttacatactttcaaatgaaggacgagagattacactctaccgtctgttcgatatggatatatgtcttttatccgcctcatgtatcatacggtccattcaatttgaagtaaccattgaagcagaaaaagatactgatctttggatcatccctgctgaaatctataaaggcatcatgaaggattctgctcctgtcgcaaactataccaatgagttaatggctacccgtttttctgatgtcatgtggctgattgaacagattatgtggaagagtttggataagcgtgttgcttcatttcttttagaagaggcctctatcgaaggaacaaacgagctgaaaatcactcatgagacgattgctaatcatcttggttcccacagggaagttatcactcgaatgcttcgatactttcaaggcgaggatctcgtcaaactctcccgcggcaaaataacaatccttgattcaaaaagactggaaacactccaaaggtcataaaactgtttttctgtaacatataaagaagaatcctccatttatcagaattatgaaagttattctaataaataggggatctttttatgctataagaaaattataaaaatatcgtgattattttttaataatccataccacatgcatatgccctttcaatcagcgcacggtcattgaccactgcatcatagaagcgaaatccgccagagaaattatacgtttcataaccgtttccttccagaatacggctcgcaatataactgcgcagaccactctggcatatcagatacacaggctttcctttctcaatttcactaattcgttctctcagttcatctacaggtatgtttttgaatccatcaatatgccccatgctgaattcacctacagttctcacatctagcaacaccacatctttatctttagaaatcttgtccatatcttccaaatgccattgctttaatgtcccttttgcaatattgtctatcataaatccagccatgtttaccggatccttggcagaagaatagggtggtgcatatgccagatccagatctttcaactgggttgcattcagccccgcatgaattgctgttgccagcacatcaatacgtttatcaactccttcatatccaataatctgagcgccaagcaaacgatagctctctttttcaaaaatcaccttcatggtcatcacttttccaccaggatagtaaccggcatgactcataggagaaagaattactgtatctacctctaatcctgactttttggcattggtttcattgatacctgtagtggctgctgtcatatcaaacacttttataacggagcttccctgactgcccaagtaacgactatcaccgccacaaatattatcagcgatgattctgccctgtttattggctggtcctgccaaagaaatcagcgcatcattacccgtaacataatgttttacctgaactgcatcacctgcagcataaatatccggtacagaggtttccattctgtcattcactacaatactttccttgatgccaagttccagaccggcttcttttgctaatactgtgtctggtgtgactccgattgccagaactaccatatcagcctgaagggatggattatctttcaatagaacctccactccgttgtcttttcctttaaatccttctactgtataccccagtaccagttttatcccatgctttctcatttcattatggatcatggatgccatatccgggtcaaaagggttcatcagctgcttaggccgctggacaatcgtaacatccatgccaagctccctcaaattttccgccagttccagaccaataaaaccgccacctggagagaggatcagcttatcatagttttcttcaaatatttcaccgttctctaaattcttaactgaaacagttttacattcgggatgtattgagataacttcatgatgaattttcatgttaatacggaagcgtttaaaaaaactctctggtgtctgtagggtaagttcttccgggtctgtgatcacgtctccaatataatatggaagtccacaattcaaaaaatcccattagcacacctccctaaagcatttctaaaatcgcattcttaggtctcgcccctgaaacctgctgtacaatcttcccattcttcataaccactaaagtcggaatgctcataatactgaacttatttgccagttcaggctcttcatctacattaatctttccaactttaatatccctacgctcatctgcgatctcctctacaataggtactaccctacggcaaggcgcacaccaagatgcccaaaaatctaaaagaacggttttatcggaattcagtacttcgttctcaaaattatttttattgatattaatagcagacattttacagtcctccttatctttttctttttgtagctttgttatagtcttaaattcatttgtttactgtgattacatcaccataccacattaaattaacttcttgccataccatctacacttaatataacacctgtaatgtaactcgcctcatttgatgcaagaaacacaaacgcattggcaatatcttctggctgtccaagacgacgcaatggaattctttcaatcataggttcgataacttcctttggcacagctttcatcatatcagtttctgtaatcccaggtgcaacagcattaacacgaatacctttaggtcctagttctcttgctaatgatacagtcaatccgtttactgcaaacttcgatgccggataagcaaccccacttggctgtcccgaaatactcaccatggaagaagttgagagaatgacacccttgcctcttgccaccatacattctgctgctacacgagtagtattaaatactccttttacatttaggtcaatgactttatcaaaagtctcctctgtataatccataaatgaggtattttctgaaattcctgcattatttaccagtatgtcgacacatccatatttttcagttgcctctttaaaagcctttctgacagactccatgcttgccagatttggactaattccagcaactattgcattgggatatttttcttttaatttatctacagcaacatctgctgattcctgtgagcttgctgccaacacaactgaagcaccttccttcaagaatttatcagctgtagcaaatcctataccacgactgccacccgtaatgattgcaactttatcttttaatctcatttagactacctccttacttaatttgtagctacattataagcaaaaggtaaattattttctgtgatatcatcacaaaataattgattcattcactgcaaaatataagaaccacctttggggcaccctccgtaaggaaggtgccccaaaggtggctcttgtatctcaattaactttgtttctttgaaacggtgtaacccctgtggttacgccgttttctctttgttacgctcagtgaggtggtgcttgaaggcttcttccatctcctccggggtcagttcgtgtagaatgccgacgccgctgtaggagaaaatctctcgctctatctttgatgaaactatgtaccggctctgatattcagaaaccttgaatgtctgctttttccgttccgcaggcatacgctgcaatggaacggcgcagccgcaatccctttcgtcggctgccttgtgtttcatttcggatatttagttgttgggtcttctatgagaacaggatataatataccatatagaacacttgttcgtcaaccatttttgaatattgctctcgaaaatagggtacactgaacggttttgttagacaaaagctcacggcggctaccgttcccgatagccgccgcataggttaaggtgctttgttatctgttgtactttttctttctgctgacaaccgttgtaccaatggcagcaccgccgctggcaaacagcagggaaatccacagtacaaggttgctggaatcgccagtctgcggactcttatcggatgttcccggtttggtactggcaggctttttctcaagtgcagcaatcgcatcttcgatagcctttgccatcttgtctacttcagattgctccgtaatatttttaccacgaacaacagctttgacagcggcttccacgccggtgaagtccttgtagttatccttgttcagtgcatttgctttggcaatggctgcatctaccttagtataatcagcgtccttgtattgcaggacagtaatcgcatcttcgatagcctgtgccatagcgtcaacttttgactgctctgcggcacttaacaaagtatcaacactgtctattgcttgtttcaaaacagatactgtttcatcagtataaacggaaatatcctgtggaactttatctaatgcaacattaactgccgtgtaatcagccaacctgtttgttaaatcccaactaaaagtcggatgttctattccttctacccatacaactccctgtgaggcattgttttgcaactaaacgagaatatcattatctgtaaaatcagttatcgcctttgcacaaggtgtcggatcaaagcttgtatcaatagcaagactacctttgtctaatttcgtaatgacatgatacccattatcactttctttataaaaacagtcagcaactgttggggttcctgtcagatgagcaatcacagcagtatattccttttccgcacttgataagtcgctgcttaccatgttacagatttaataccatcttttctttctgtgtattttttgacatgagtattcctcttcagattttgctttggtcagttcttcaagtaaatcttgatttttcacaattctacaagctggaaattgtttatccaaaatgaaatggaataaccatatcaagtaaaactgcaagaactatactaatcgttcccattagcgcagaactcctcaatgtgtctctcctcaaaacaataagtccaataataaagactatcacttccaaaacagattttgcattaaaataccagcatccatatacaaagcacatattgaacaatactgccaaaatcagcgctgatagtataaatgccagtttgcttttcccctttgcataccaacagacaaaagccaataatggagaaacagctgtaaatccaaaccaaatcatcgcataacttcttgggaaaaatcctgcaatatagtttgaatacaaatagtagcttgcaaccataccaacaaagaatacaaaaacattgatgcttgctcttattgcagaattgctataaatagaaatacacagtgcaatcaatatccagattgcaaaacgcccaagaaaattaccaatatctaagactccatttattgccataagcacacctggaagttcagtttgacgaaaatccagatattttgagaaagttcccaaagctattccgagaaacaatatcgctatggtatttataagttttctattattggatattggattttctgcattccttatatcattcaaaaaatttatcataattaccctcacaaatcccgattgaacaaaatcgctgcgcgatggcctgccaaggctgtggcgcagttttatttttattaaaaagcagtggaattacattatgttgcagtaaattcaataaatcagtatcatatatttatacatacaaacagcgtagaagttttaaaatatgaatgcagaataaaacagaggataagaggatatgaagaacgatgaaccggagataaaaccggcatacaaaaatcctttaatggagcattacgagtgtgatggccagataaacatgttcaggtatctggataaataatttcgtttatttggagaggctggataaaaaatgcagatatttgtagacgcagacgcatgtccggtagtggacatcatagagaaaatagcagaaaaagtatctttaaacgcccaaattagaaaaattactattcttcactcttcttcaacttcgaataataactatccgcagtataaagcgccgccaccggattatgccccaatacacggtctttcgtcactgctgtcgtagtcagtgcctcggaatatttgtaaaacagactgtcatgcccaacacaaagtccgaccacaacattcaggtccgtcttcgccttgttcagaagctttgcctgcaggatcggattacacatattcacaccgacaccttcgcagcattccgggatgccgaccgatgtcttcttctgtgttccggctttacagccgacaccatacacctcaaagccatgtctgcgcaggatatctgccaggatacggctttctttcaacaatccgacacaggttgcgatcccaatctttttcgcattaatcttctttgcaaaatccatgatttcttcgacacgggtatgtttgcagtaattctcatactctacttcagctgcagcgattgttactttgcggttctcgtcttcattgtagcattccatagcttcatttagaacttcttcatccatgtgtgttgtcagacagaaatccggataggttttatccattttgttgcagttttttactgcgcagtcgatacaggacatgtcttcttttttcatttttcattctccttttgtataccttggtatctacagagacctgccactggcagattctctagattaagctttactttgtaaaatatcctctatttatttcataataacaaatacttatactacagacaatggttttccgtttttattctcttatttttttccttttgcaaactggaattgaacaaaatcgctgcgcgatggcctgccaaggctgtgacgcagtttttcttttcctaaataaaaagcagtggagtgggtgtattttccaaggtatctgatgacagattcggcaccgtcaaatggtttcttgcaataaggaatccattcctttgcatagcaggtatttaacaattccttgaaagtatagtagtttttgtaaggtgcagccgatccatgaaattcaagcctgtcattttcccagagctgcttaagttcagccatgtattttccacgaaacaatgtcattaagttaagaattttgacataattataaaacacatcatatttgcaattgtttgataaatatgatgtgttttttcttttgtctattttgcagcacaacaaaaagacagattgtttatctgtcaaaaaaacttataattatctatgattaagccactctatatagaaagcttacagatgcctgtaatggattggcttactgcgacaaaaacaatccggtcactgaaacatccagagcaaagcctgtaaaaatcgaaaatgtaaagaaaattttgtgcgattattcggtatagcgattaggatttctcgaatccgtaaacccattttccacgtaagaacagatacagaaaaatcacggagctgataccccaagtcaatgggtatgcccagaaaatcactcgtatatccgggagaatacggactgccacagtaatgtagcttacgcgaaacaaacaccagtcacagagcataacgatcatcggaacggatgcgttacctgatccacgaagtattgctgcgatgcaatgagaaaacgccagcagacaataaaataacgcaattgttctggactgcatgactccataatgtacaacatcaggatctctgttaaacgctgtgatcagtaccggtgctgccacatatatgataataccgatcaactctgcaatagtaatcgagcagaaaactccaaatcttgctccctttttcgcccggtcatactgttttgcacccagattctgactgacaaaggttgtcagagccattgtaaaacaggtcaccggcaaaaaggcgaatccctctatcttggagtaggaaccacatcctgccatcgccatttttccaaatgcatttatatttgactgtacaaagacgttcgcgatcgcgatcactgaattctgaaaaccggatggtacaccattctggatgatctgcttcagcatagaactgtcaaaacgaatctctcgcaattccagacggtattcttcttccacacgcagcagatgaaccatacagagcagtgcactgacaaactgtgaaattgcggttgcaagtgctgctgatccgactcccatgccaagacctgcgataaagaaaatatccagaacgacattgacacaggaagaaataatcagatatatcagtggatggcgtccatcaccgaccgactgcagaactccaacaaagatattgtacatgacaacacccatagaccctgcaaaatatgtacggaaatacacaatagattccgggagcacatccgcaggagttcccatcaataccaggatctttggtgccagaaacattcccaaaactgtcagcacagcaccggccacaagtccaaatgcaaccgttgtatggattgccttttgcaggcagtctctttttttggctccgtaatatcgtgcaataacaacacctgcacccatggcaatgccgttaataaaacctaccatcagaaaaatcagatttccagatgaactgactgccgccagtgcattacttcctagaaaatttcctacgatcagggaatcagcagtattatacaattgctggaacagatttcccagaaacaatggaattgcaaaaaaaatgatcttttgggagatacttccctctgtcattctcagactctttttcatagttaaaattactcttccctttcctgtgttctttgaatcaatagagatgagggactgctcttcgtgatagttgcctctctaccttattatttgtaccataccatgcatatgttgctgatgtcaatgtaaagactgcttgtagagctggaatttccatgcacatctgtggtatatgtaaaatttcggaaatagaaacatttttgattgctttttcagtcttaaaaccattccagaaagcatattgaattacttttttgagcctaattcgaaaaatgacgtatcttcagatgaatacccctctcatcagcaatctgctgacaagtctttatatcctcctcaggaagtacatccacgatagaaagctgtgtatgcttgatcatgcggttacattcctcggcaaaatccagcatagcctcataagcattgtcaaaggttggtcttgtgaccttattgtattcctcggcatttgcagcattcaagctgatggaaacagaatcaatatactcagcaagctccggcacgatatcgcgtccgtggtagagatttccaagaccgttcgtgtttacacggataggaagcttatactttgccttcacatatttagctgttttctcaaggatatccagcgcgcaggttggttcaccgtagccgcagaagacgaattcctcatagcctgtaaaatcaaatgcattgattgcagctattatctcatcatatgttgggtccaccgtatgccacagtgatgtcgcatcgcctatagcgtccttctgagagcgtatacagaatgtacaagcgcagtcgcatttatttgtgatatttgcataaacttcgtttttgtatgtatagattatatcagccattatttagtctcctccaatgtgaaaaatcttctcttgaatccgattttatcgagcaccagtccaagaataacaaatattatagcacttccgccgctttgtatacagcttcccggaacagaaaccggaattattgcgatgagaccggtgaaggcctgttttgtgaaactgtatgtgataaatgcctctgcaatagcatagccggttgcggaaatggcgaaagctatgattgtcgatactacatttctcacggtcataattttatctgatttgctggtaaacggaatggatatgagtgccttgatgatgattgttgcaggcgcccagataggtgcggtcagcaaatctgccatgccaccgccgatagctgcggctgtcattgcgtacggccatggaaggaggcacgctgcgatatagataaggctgtcgccaaaatgaatatatccgccattctgtccaaccggaatgtggcatatatatgctgtgaaaatagtaatcatggctgccatgagggcagtaaatgtgagttttttaacctgtgagttcataaaataggttctcctttgtgttgtgttaagcctgacttaagagctcaattgataattcgataaattttctgcaaagggtgataagaatcacataaacatcacatcagttcccgcaaaaacttctcgaaatttactccgtcattcggtgcggtgtcatcattcatggtatctgcgatgctgtcatacaggaattttccggcgcgctctgcggcctcctctgtggaaaatccgttcagcctgcttccgcatataacagatgcaaacagatctcctgtgccggaaaagctcacatcgaaaaagtgtgatctgtgggttgtagtaccgtttgcggtagtcacgagattgtatataaagggtgccttgtcatccctgcatttgatgcctgtgatgatgacatcctggtttttgccggacaggcttcgcagcttctcgcttatctctgtcgcaagcggcaggagcacatcctttctcgtgtcgctgtataccttttcgatatcatagtctgccaaaaggcatgcctcggtcaggtttggtgtgatgacatcggcctttctggaaagagccttcatgccatccaaaagagcggcagagtatatgccgtaggttctgccgtcatcgcccatcacagggtccacgagcagcatcgtgttttcctcataaaatacatccaaaaaatccataaaaagctcaatctgctttgagcttgtcatgaaaccgctgtaaatgccgtcaaaatgggcattatttttctgccagttgtagatgtagtccttaatcatggctgtcaggtctgtgcatttatgatattcatatcctgtctggtttgtcagcactgctgatgccatgggacagcactgtacgccctgcgcggacagtaccgggattgcggcggtcagagagcactttccaaagccggacaaatcgttaaaaacggctgctttcttcatatatcctccaaattttttgcttaattttctcatacaaaatataggataagtatacatgcgtctgaccatatttctatgaccagaaagataaaaaaataaatgccagataaaatgtttttgaaaaagaacgctgtctgtgatattatagatgtgtatgtaaatacggaggtaaaagcatgtttcaaaagaaacagattatatatagtgaaacccttggagtatgcgtggttgacaacatagtatcgcttgcggcatctaagagagaaaagccggtgctgtactatgtgctcaagcctgtgtttgaggacaaggtgtcatatataccggtagagcatcaccgggtggtactgcgtgatatgttcaccggagaagaagctttaaagcttaaggaaactgagcagtatgagaaggataagcaccttaggcaggcagttgactatgtactggacaaggtggctataaaataaaattacaacaaggaggacaggattacatgggacagcagcatgcaatacacaaatttgtgctgggaaccaaggacttcgatgataagcagtcagagttcatgtacgataaaggctggtacagcatcacggatatagtaggtgaggagaaaaatatcatctacaagtcaagaaatgcccaggaggcatatcttaagtggaatatctatatcggcaggaaaaaggaacgcctcacacctgaggagaggaagaggcagcgtgaagaacgctatgagaaaaagagagaacaaaacagagagcaccacaggatataggagggcattatgggcattttcaacatagacaacaaatttttcagagcattaaacaaactggtagatatggttattttgagcttttgctggatcatatcatgcatacctgtttttacaataggagcggcatccacagcactttacgatacatcgcgccgtgtcatccatcacgatgagggctatgtgtggagaggctactggcatgcgtttaaggtaaatttcaagcaggccaccaaggcatggctggtacagcttataatacttatcgtgcttttggaagatatttatattacgtggtcaggtcttaagacaggcaataagtggggagccttctctatcgtgttcatcataatggcacttatcgccgcagcctgggccatatacacatcagcgtatatttcacgatttgagcaggtcacaaagataacccttaagaatacaatactcattcttatcgccaacctgccgtggacattactggtcatagtgatacttgtggtatcacttatacttgtatggattcttattccactcattttcatacttcctgtcggcgcagcactcacctatgagtttatttttgagcgtattttcagaaagctcatgcctgaggaggacaggctccgcgaggaggagaaggataaggagtacagggattagcataataaaagacaatcataataatgcataaggaggaagcagcaatgaagaaaattggaatgcttaccagcggaggagactgccaggcacttaacgcagccatgagaggcgtggtaaaggcgctggcacacaatatcgacgagcttgagatttacggctttgagaacgggtacaagggactcatatatgagaactacagaatactcacatcaaaggatttttcgggcatcctgacaaagggtggcacaatactcggctcatcaagacagccttttaagcttatgagagtgccggatgagaacggactggacaaggtcgcagccatgaaaaatacatacaagaagcttggtcttgactgccttgttatcctgggcggaaacggtacacaaaagacagccaatcttctcagggaagagggacttaatgtcattcatctgccaaagacaatcgacaatgatatctatggtacagatgtgacctttggcttccagagcgcgatcaatatagctacagatgcaatcgactgcatccacaccacagcagcatcacacaaccgtgtattcatcgttgaggttatgggccacaaggtaggctggcttacattgtatgcaggtgttgcgggcggtgcggacatcattctgcttcctgagataccatacgatattgacaaggtcgtagatgccatccacaagagaacaaaggagggcaagggctttaccattcttgcagtagcagagggagccatctccaaggaggatgcagccctttccaaaaaggaatacaagaagaagcttgcaaagagcaaatacccgtcagtatcatacgaggttgcagaccgcatcagcgaaagactcggtcttgaggtcagagtggcagtgccgggacatacacagcgaggcggcagcccatgtccttacgacagagtgctttgtacacgtcttggctcagcagcagcaaaggccatcatggatgaggattatggctgcatgatagccatggtaaacggacagacaaagagggttccgcttgccgatgtagcaggaaagcttaagactgtagatccaaagagccagatgatcaaggaagcaaagcgcaccggcatctgcttcggagattaagcagcaatattagatataaggaaggtgaaaaggcgtgtcttatcaggccctataccgtaagttccgtccacaggagttcgaggacgtaaagggacaggaacacattgtaacaacactgaaaaatcagataaaagctgacagaatagggcatgcctatttattttgcggtacgagaggtacaggaaagaccactgtggccaagatatttgcaaaggcagtcaactgtgagcaccctgtagacggaagcccgtgtggcgaatgtccgtcgtgcagggcaatcactgagggctcatccatgaatgtcatagagatagatgcagcgtcaaacaacggcgtggacaatatcagacagattcgtgaggaggtcacataccgcccgacagagggcaggtacaaggtttatatcatagacgaggttcatatgctttcggcaggagccttcaatgcacttttaaaaacacttgaggagccgccgagctacgttatatttatactggcgaccaccgaggcacacaagataccgattactatcctgtccagatgccagcgctatgatttccacaggatttccatcgatacgattgcatccagactcagcgatttgatggagcaggagcaggtggaggtcgaggagcgtgccataaggtacgtggccaaggcaggagacggctccatgcgagatgcgttaagtcttcttgaccagtgcattgctttccatctgggtgagaagctcacctatgaaaatgtgctcgaggtgcttggagcggtggacacagaggtgttttcaaggctcttaaggcgcatactcgacgaggatgtgacaggcgccatccgcatactgggcgagctcatagatgagggcagggagctgtcgcagcttgtcaatgatttcacctggtatatgaggaatcttttgcttttgcagagctccgacgatatggaggaggtgctcgacatctcaaaggacaatcttgaggcgcttaaggaagaggcagcgcttgtaaagcctgagacactcatcaggtatatcagggtattttccgagttgtccagccaggtaaagtttgcatctcaaaagcgtattatggtcgagatagccataataaagctgtgcagaccgcagatggaaaagagctatgattcgttgcttgaccgcataaacagcatagagaaaaagcttgaaaagggtatacctgtagcggcacaggctgcgcagacacaggatatgcagcaggccgcagcaagcgggcctatagtgaaaaaggagcttccaaaagcaataccacaggatatctcagagctcatgaagcactggaaatccatactttcggagatgggagcaacatcaaaggtttatctgaacaaggctgtgacatcgcttggcaattcctcggacctgattttaatgtttgatgatgagaatgcatatgagtatctctctgaaaaccgtgcaggctgtatggatacgctggcttcgcttatagaaaagcgcataggcaaaaaagtcgaggtgacggtcaagaaaaataattccgcagtcagcgcaaaggaagcggttgtggacttgacagatatgataaattttgatatagaggaagaaaactaagttataagcagggctgtgattagcccattaaaaacaaggaggacgccagaatggcaagaagaggtggattccctggaggaatgccgggaaatatgaacaatcttatgaaacaggcgcagaagatgcagcgtcagatggaggaggctcagaagcagcttgaggatgctgaggttacagcaaaggcaggcggcggagcagtcgaagtcactgtttctggaaaaaaagaaatcacaaaggtaaaattatctgaggaggtagtggatcctgacgatatcgagatgctcgaggatctcatcatggcagcaaccaatgaagcgcttcgccagattgatgagcagtcacaggcatctatgtccaaaataaccggtggcctgggtggcggtctgttttaatggatttttacagcagtgagatatcaaaactaatagaggagctgtcacagcttccgggaatcggagccaagacagcgcagagactggcatttcatatcataaatatgccaaaggagcaggcaaaatcgctctctgacgccataatcgatgcgaaggagcatgtcagatactgcaaatgctgctatacactcacagatgacgagctatgccccatctgcaaggatgcggcaagagatcacaagaccatcatggttgttgagaatacgagggatcttgtggcatacgaaaagaccggtaaatatgagggcgtgtatcatgtgctgggtggcgcaatttcacccatgcttggcataggtccggcggatatccgtctgaaggagctcatggttcgccttgaaaaagacgtagacgaggtcattatagcgaccaattcaagcctggagggcgagactacggccatgtatatcagcaagctcatcaaacctaccggcatcaaagtgacacgaatcgcgagcggagttcccgtaggaggcgatttggaatatattgacgaggtgaccctgcttagggcgcttcagggaagaacagagatataaatgatagaaggagacatcatgaacaatcttgaacttgagaagatggcgaatgaaattcgcaaggacattgtgacagcagttcacagtgccaaatccggacatccgggtggatcactttcatcagcagatatttttacatatctgtattttgaggagatgaatgtagaccctgccaatcctaaatgggaggacagggaccgtttcgtgctctcaaagggacacgtagcaccgggactttactctacactcgcagagaaaggatattttccaaaggaggatttaaagacactccgtcatacaggctcatatctgcagggacatcctgatatgaagcacatccctggcattgatatgtcaagcggctctctcggacaaggagtatctgtcgcagtaggaatggctgcagcaggaaaatatgacaagaaggattaccgtgtatacacactcacaggagatggcgagattcaggagggacagatctgggaggcagccatgtgggcaggccaccgcaagctcgacaacctcgtagtcatcgttgacaacaataacctccagatagacggttctgttgaggatgtatgctcaccatacccgatcgacaagaagtttgaggcattcaatttccacgtaatcaatatcgatggcaacgatttcgaccagatcagggcagccttcaaggaggctcgtgagacaaagggcatgcctacagccattatcgcaaagactgtaaagggcaagggcgtatccttcatggaaaatgccgcaggatggcatggaaaggctccaaatgacgaggagtatgaaatcgcaatggcagacttagaaaaggcaggtgaagcattatgtcagaagtaaagaaaatcgctacaagagatagctacggaaacgcactcgtagagcttggaaaagcacacgatgaccttattgtacttgatgctgacctggcaggtgccacaaagacctgtatattccagaaggaatttcctgagcgtcactgggactgcggaatcgcagagtgcaatatgacaggtatcgcagcaggacttgctacatgcggcaaggtgccttttatcagctcatttgccatgtttgcagcaggcagaaactatgaacaggtaagaaactcaatcggatatcctcatctcaatgtcaagataggtgccacacatgcaggaatatctgtaggtgaggacggagctacacatcagtgcctcgaggatctttcgctcatgagagaaatcccgggcatggttgtaataaacccatcagacgatgtggaggcaagagccgcagtaaaggcagcatacgaccatgtgggtcctgtataccttagattcggcagacttgcagtgcctgtaatcaacgacacaccggactacaagtttgaaatcggaaagggtatcgtactcaaggaaggtaaggatgtatctatatttgcaacaggacttgaggtatcagagacacttgaggcagcaaaaatgctcgcagcagacggcatagatgctgaggttatcaatatccatacaatcaagccaatcgacagagagctgattgttaaatctgtatcaaagacaggcaaggcagtcacagtagaggagcactctatcaatggaggactcggaagtgctgtggcagaggtactctgtgaggagcagcctgcaaagcttctgcgtatcggtgttgaggaccgtttcggcgagtcaggaccggcagtggagcttatccacaagtatggactggatgcagagggcatctacaacaaagtaaagaattatatgaagtagtaggttttgctgcttcgcacttggaggctgtgttcaccggtgcagcatacagtatattcctcagaaaaatatgaagtcagccgcaggatttcgtgtggatagcgtgtggaatgagtttagtcattcttgctattttacataatggaaccctgcggcagttcatattgtttcttcggaatatgctgcatactttccggtggattacaggttgtcgagtgcgaagcattttacttcttcatatgtgtgaaaagtcgggcgcatggattcatgcgcccttttttcgttggggattaactgcaaaatacctttataatcgcataatattgcataaatttacaatctgcaagtgctatgctgaccgaaaaaggaggctggcatgatagatattgtgacgaacaacgtcaggcagattggcacaccggcggatgagggccgggtttacatatcggagaaagcgtacaagcgcataaagacagagggctttaaggataaagaggtttttgtacttatgggacatacggagagcagcggaggcaggtatgccacatttgtggaggcggcgattgcagtatatgatatggagtttgacaaaaatgcgcctctttggaccaacaaggtatggagcagagtgtttgcggagataaagaaaagctacgaggagctgattatcgtcggatgggcattcaggcaggaggattttccggctgagccaacacctatgcttgaaaatatacaccgggagcactttggcggcgcccatcagcttatgttccttttgaacaggaacgagcaggaggaaaacttctttatcaaaaagaataatcatctgaagaaaaagacaggcttttttgtatattaccgtatgaatgagcattgtgatagtgctgacagctataatgaaactgacacctgcaataaaacctacggctatagtaatgcaaacaacaataataaaatcgacagttatagtaatgccgatgacaataataaaagcagcagccggtatgaggacactgacacagcggccaaaagcagctacagccggatacatagaagagcttcggcagatgacagtatcaatgtgtcgtttcctgaggaatttggcagcatatcgaaagaacgcggccggtacagaaaagccatggaggcaggaaaagaagagcgcaagggttcgtttgcatctgtagtgatgattgcagcgatagcagtgcttatagtgcttatcgggcttaaagccggcgctggaatgagtggcacaatagacaaaaaggagacacttcctgccatgtccacagaagaagatttaattccagtggaaaaaatatccggtgaatggtatactgacaagtaacaaacactttggaagtagaacaaaaggataagattatggcacagaaatcagactttaaaactgtcgagaccgatttggacgagctcgaggagaaaatacgaaagcatagaagaaaaatagcaaaaagaataataatagtcgtggcagcagtcgtggctttatttcttatagtatggttgtggatggcgctgcgcacctacaagtcatttgacgtcaaaaacagcgtggagcagaaggacaagagcgcggtgtcgttcgtggatttctgcggagcggtagtggagtacagcaatgatggtgtattgtatacagattcagacggaaaccgcatatggaaccaggcatttgagatgtcatcgccacaggtagtcacatgcgaaagctttatgactatctatgacaggggtggaacagacctctatatcatggacaagaatggagtaaaaaaagaaataggaacatcgtggcctattataaaagcctgcatagcaagccagggcacagtggcagtccttgtcagtgagaatgaaaattattatgtaaagctgtatgatgtaaacggaaaagagctggcaagtggtgagtttttcggagaacagaagaacatacctgttgatatagctctttcatatgatgctaaaaaactggctgtagatatgatagatgtctccagaggaaagacggacagcgttatatccttttacaattttggatcagtaggacaaaatgagatagacaacaatgtcggcacctacaagtatgagaatcagctcatacctgaaatagcatatgtttccgacagcaggatgatagcagtttcagatcagaatattatggtatttgacggaagccagaagccaaagctcaagcagactattaagctggaaaagctgatagacagcgtattttacaataataaatatataggagtagcatactccaacaatgataaaaattgcaccagtcatatcaagctttatgattttaacggtaagatgcttatggaaaacggcacagctattgcctacaatagtatagagtttgacagcaataacgaggtgtgcgtcacaggagacacagcctgtgagatatacaccatacacggagttaagaaattctatcatacatttgacaacaagctgtacaaggtgatgtataaatcgggtatgaataactatatcttcatctatgatggcgcaatggacgaggtgagactaaaatgaattggctgttaattgcggtaatatgtattattgcgtggaatgtggtgagaggctacacaagaggtgtgcttcgcatggtatattcgcttgcagcctggatagtaatgcttgctgcatcaaccatggcagccccatatgtcagggatcagatattatcacagacaggaatagagcccgtaattttaaacggtattgaaaaacaaatagctgcacagggacaaaaagccacaggcgattttgatatggcaaacatattgctgcagcaatccagagcatatgacaccatatccgcacagcttacaaatgccattatgacaggtttgtcattttttatagtattttttttgttgggaatagtggcatacatagtccgtcacatcatcagaaaaatagaaagggtgcccgttattggcactgtgaaccggattgcaggctttgcagtaggttttattaagggaatggttatcgtatggctgctccttgccctgacatcattatttgccgcatctgaaataggacggacaatgacagcatatataaatgattctatgatgcttaagtatctgtatgaaaacaatcctgtcataaagctgatagaaaatatactgtagcttaaaccggtgtaataatgcataaaagagaaaagtacataagcaatagatggtatgtggataagtatgtaaatacaatatatagttgtgtaaaaacaatgagaaaaaaatatatataaaaaataaaaaatgtgttgactttatgcgacacagatgatattatatcaaagctgactcgcgggacacattgagttgtagagcttgtgagttacaatttacagacatgactttataaatattgctttgaaaataagttaaaaaagttatgaaaaaagttcttgacaaatgtaaaacattttgatagaataaacaagctgtcgcaagacagagaacttaaaacagagttcaaaaaataaaaaaagtgcttgacaaacgaacagcgatttgataaaataaacaagctgtcgcaagagagcaaaacaaagaacattgatagaaatttgcaatttccacttccatcgttagaagaacaaaagtcttttgtagagtttgctgaacagctcaacaaatcaaaatttgatactatgaccttcgccccaatatatgctataataaacctatatttacacacttatttttatcagggaaggagatgagcatgcatgactgaatcacttaaactaccggtgggaatagagagctttgaggagattcgttcagacggatattactatgtcgataagacaaagctgattgaacagttggttgacagccggggaaaagtcaacctttttaccagaccgcgtcgttttggcaagactctcaacatgagtatgctcaaatctttctttgaaattggagcagcttctgaattatttgatggtctttatatatcgcacaacaaaaaaatgtgtgatgataatatgggcaagtatcctgtgatatttctatctttaaagaatgtggaagggctcgattttcaagctgcaaagtatcagatgatagagataattgcaaaggaagctaagagatttgtatatttgaagaatagtgacaggctggacattgacgataagtcgacgtatgcttctttaattcgattagaggatggcagatatgaaatgagagatgaggcactgtatgcttcgcttcaaactttatctgagctgttatataagcatcatggcagaaaaacggttattttaatagatgaatatgatgttccactggataaggcatttcaaaatggctattataaagagatggtttctttgatacgtgccatattcggaaaagcattaaagacaaatgaggcattggattttgctgtcttaacaggttgtcttcgtgtttcaaaagaaagtatttttacaggattgaataatttcaagattttatctattactgatacaagatttgatgaacactttggatttacggatgatgaagtagagcgtttgctggcattttatcatgtggaaaacaggtttgcggagacaaaggaatggtatgatggttatcatttcggaaatgtcgatgtatactgtccgtgggatgtaatcaatcatgttgaccgaataaaagatgatccaatggcaggaccggaagcgtattggattaatacaagcggaaatgagcttgttaagaggtttatagataaggctggtaagacaaccagagatgaaattgagcgtttaatcgcgggagaagctatagacaagcaaatccgtctggatatgacctatgacgaaatagacaataatattgataatctatggagtgttctgtttacaacaggttatctgacatatacaaagataagtgaggacaaaaaatatagccttgtaattccgaacaaggagattaaagaagtatttaagctgcagatacaggagtggttcaggaataaaatattttccaataccgagcagttgcaggacttttggaaggctttcaaagatggaaatacacagataatggaaatgtatttaaacaaggtgctcagtaattcggtgagcgtttttgacacaagagcgcgaaatgatgaaaaggaaagctcctatcataatctgcttattggtattttgagcggcaatgaggactggctggtaaagtcaaatgttgaggcaggagagggctttgcagatattattgtggagacagatgatccggatgaaggaattattgcagagcttaaatacacaaaagattttaaatctatggaaaaatcctgtgaaaaggctctgaaacagataaaggatagaagatatcaggaatatctgttaaatgatgatcgacagaatatcatgtattatggaattacattttgcaggaagagatgcaaagtgcttgtagaaagataaaaggggtgattacatggaaactaattttgattaccttttaaagaaagaagaatacgcagattttgcaaagcaggcagttgaagcagaaaaaagtttatccatttcaccggccacttgtgccattttgtcgaggcgtgcacttgagcttgcagtgaggtttgttttctcatatgacgcggagctttcgcttccgtacagagataatgtatcgagtcttattcatgagccaacgtttagaaggataattgagccaaggctgtttccaatgctcaaatataccattcatctgggaaatgttgcagttcataccaacaacaatataggcagggatgaagcaataatagcgcttcgtgatttgtttgagttttgcgattggattgattattcatattcgagggaatacgatgagaagacatatgatgagtcgattcttgcaagcggtaatgaaaagcgtataaaggctgatgagctcatgaagctgtatgagggcttaagcagtaaggataaaaagctcgagagcgtattgaaggagaatgaagagcttcgcgagcagatggcaaagaagcgtagtcagaatgtaaagacaagggagttccatgtagatacgataagcgaggcagaaacccgcaagagatatatagatgttgccttaaaggaggcaggatgggttattggcagaaatgtcacggaggaggagccggttacaggaatgccaaatagcacaggaacagggtatgtggattatgttctttggggaaaggataatctgccacttgctgtagtggaggctaaaaaggcttctgtggatgctatggtaggaagccagcaggcgaagctgtatgctgactgtttgcagaataaatacaatagacgtcctcttattttcataacaaatggatttgaatttttctatacgaatgattatatgggatatccaaggcgtgaggtttcaggatttttcacacaggaagagctgcagcttgagatggatggacgcacttcaaggattccgcttgaaaatatacggataagcgatgatattaccaacagaccatatcagaaagaggctgtaaccgctgtctgcgatgctatcacaaataagcaccgcaagatgcttatagtgcaggccacaggttcaggaaagacaagagtgagcattagtattgttgatgtattaaggcgccacaattatgtgaaaaatattctgttcctcgcagacagaaaagctcttgtgaagcaggccaaaaacaattatacgaatttgcttcctgatttatcatgctgtaatctgcttgacaataaagaagaccctgagtcatgcaggatgattttttctacatatccgacgatgatgaatgccatagatgagaggaaaaacaaatatggtgagaagctctttagtccggggcattttcagctcataatctgcgatgaagtacaccgcagcatttacaaaaaatatcaggaaatatttgagtattttgatgcgatgttacttggtatgactgccactccaaaaaatgaaatcgacaaaaacacatatggagtctttgaccttgaaagaggagttccgacatttgcgtatgagcttgaaaaagcggtggaagagggctatctggtcaattattctacactggaatataagtcaaaaataatggaaagcggtattcactatgatgagctgtcagatgaggaaaaagaagagtatgaggatacattttctgatgatgacactgtaggtgatgatatatcaggagaggccgtaaatacatggctttttaacgcggatacaattgataaggttttaagagagcttatggaaaagggcttaaaaattgagggtggagacaagcttggcaagacaataatttttgccaaaaactctttgcatgcgcaggcaatagtcaagcgtttcaataagctttttccagaatatggaggagacttcataaagcggatagattatagtataaagtacaatgattcattgatagatgagtttagcacaagtgataaaatgccgcagatagcagtatctgttgatatgctcgacacaggaatagatattccggagattttgaatcttgtattttttaagaaggtaaaaagctatgccaagttctggcagatgattggaaggggaaccaggctatgccctaatctgcttggcgagggtatggacaaagaaagatttctcatatttgatttctgtaacaattttgaatatttccgcgtgaacaaaaatggagcggagaatggcataacagaatcactcaatgagaaaatatataacacaaaagcccagattgtcagagagcttcaggcaccggtatacagtggtgatgagatatacgcagattacagaaaaagtcttgtggatgatttaaagaaagatgtaattagcttaaatgacgatagctttatggtgaaaagacatctgcgttatgtagagtttttcagggcttcatcatcgtgggataatcttgagacaatagagatttcggatatcagggagcatattgcacctcttatcagacctaaaaaggaagatgagctggcacgaagatttgactatctggtatacagtatagatcttggactgctgcaaagcaaaagcatacaaagtccggtgaatatagtggttcagaccgcagaaaagctgtctgccaaatactcaatcccacaggtggaaaagaaaaaggagattatcgaaaaggtccagacaaatgaattttgggataaagtcactataatagagcttgatacagtaagagaagctttaagaggtctgttgcagtaccttgacagacaggtacggccaatatactatacaaatttcacggactctataacagatggtacaccgggtgaacctttatatggcggaaatgacttgaaaaattatcgtaaaaaagtcgaattttacctgaaagagcatattgacaaattgtcagtgtataagctgaaaaacaacaaaaagctgacagaaacggatctaagggaattggaacgaattctgtggactgagcttggttcaaaggaagattatataaaggaatacggagagacaccgataggcagattagtacgaaaaatagtcggtgtagatagagcggcagtaaacgaagccttcagttgttttatgtcagaagagcgcttgaacataaatcagatgagattcgtaaatctgatagtggactatatagtagcaaatggaaatatcgaagataataaagtattgatgggtgaaccatttaaatcagttggaagtatcacaactcttttcaaagatgatatgagtaccgcaaaacagataatggagatagtgaaccagataaagcgtaactccgaagaaattgcctgatgtatagcgaatctgtttagatatgacagaaggacttaaagcagcttagaaaaatccttatggatgcaacgaatgatgattacattatgtaggagaaaataattatggcaaagaaaattttagtagtagtggacgcacagaatgattttattacaggagctcttggaaacaaagagtgtgacgtggcaacaaatgttattgctgaggaaatcaggtcaggcaaatatgatgacgtgatattcacaagggatacacatgatgaaaactatctgaatactcaggaaggaaagaaacttccggtaacgcactgtattaaatggacaaacggatgggaagtagacgctcgtcttaaagatgcaatgaaggagcgtggagttaattgtgacgatattacttatattgacaagccgacttttggcagcaaagagcttggtggacttctagcggaatatgataacagcgatacagagatttatttctgcggattctgcacaggaatatgcgtaataagcaacgtggcgattgcaaagacattctgtaaagacgcagaggtgttcgtaatagaaaatgcctgcgcctgcgtaacgcctgaaagtcataagactgcaatagaagcaatgaagatgatccaggtaggcattaagggcacaccctcatgttagcgcacatgagggtgtgccctctgccgtattcccggtctcccggttttcgtaatcatgccatgacactgaattacgcagtctttccggtataaagctgataatactttcccttctttgcaatcagctcatcatgacttcccctttcaataatgcgtccctgctccaaaaccataatgcagtcgctgtttctgacagtagaaagcctgtgtgcgataacaaatgtagtacggccatgcatgagcttatccatgccgtcctgaacaatacgctcggtacgtgtatcaattgagcttgtagcctcatcgaggatgagcacaggcggatcggcgatagcggcacgcgcaatggctagaagctggcgctggccctggcttaggtttgcaccgtcacctgtcagtacagtattgtagccgtcaggaagctggcggataaacgtatcggcgtttgccaggcgggcagctgcgtatacttcatcatctgtggcatcaagcttgccgtagcggatgttttccatgacagtagctgtgaaaaggtgggtatcctgcaaaacaatgccaagagagtggcgcagatcagcctttttaatcttgtttatattgatgccgtcatatcttatcttgccgtctgctatatcgtagaagcggttgataaggttagtgatggtagtctttccagctccggtggtgccaacaaaggcaatcttctgaccgggtgttgcaaaaagatccacatcgtgcagtacaattttctcaggaacatatccgaaatccacatcgtcaaataccacatcgccctcgagttttttgtagtccacagagccgtcagcctgatgagtatgcttccatgcccataagccggtgtgctcaggtgtttcagtgagttttccgttttcttccttagcatttaccagtgagacatagccttcgtcagtctcaggcgtttcgtcgagcagagagaagatacggtcgcatccggcaagtgccatgatgatactgttgaactgctggctgacctgcgagataggcatgttaaagctcttgttaaaggtcagaaagctcgcaagcttaccaagggtcagaccgccaaagcctgaaagagccataacaccgccggcaagagcgcagagcacgtagcttagatttccaatctgtgcgtttacaggaccgagcatgttggagtacatgttggcattgtaggcgctttcaaagagttcatcgtttattttgtcgaaggcttcaatattttcctgctcgtgggtaaataccttgaccaccttctggccgttgagcatttcctcgatgaagccgttaaccttgccgaggtcgcgctgctgcgcaaggaaatagcggctggagaagcctgcaaatttctttgtcacgactgttgttacgattaccatcacgatagttagtacggtgagcggaatatttaatatgaccattgaaacaaaaacgctcacaacagtgatagcactgttaagtatctgcggaagactctggctgatgagctggcggagtgtatcgatatcgtttgtataaattgacatgatatcgccgtgcgcatgtgagtcaaagtatcggattggcagatcctgcatatgggaaaagagctcaacacgcagattcttaatggtgccctgtgatacgtagatcattattttgctgtatgcaaacgtactgatgacgccgatgccgtagaatacggcgacccttcccattgcagcaaggagtggtccgtagttgggatttcctgtcttaagcagtggtactatatagtcatcaatcaaatttttggtaaacatggttccctgcacatttgcaagtacactgacaaagatacatatcacaacaattatgcaggcaggtaaatatttcttgaaaataaatcccatgaggcgcgcaaaaagcttaccgggatttttaattttgggttttggacctcgtggccctcttggtcctggcatcaggcagcacctccttcatcaaagtctcctccgccgtttgtctgggaatcgtaaacatcgcggtagatttcattatttttaagcagattttcgtgagtgtcaaagccgtccacttttccgtcattcatcacgatgatacggtcagcatccatgacggatgagatacgctgtgcgatgatgagcttagtggttcccggtattgtttttgcgagggcagcacggatttttgaatctgttgctgtatccacagccgaggtgctgtcatcgagtatgagtatccttggctttttaagcagagcccttgcgatacacagacgctgcttctggccaccggatacgttggttccgccctgctctatgtaggtgttgtacttgtcagggaaggaatcgataaagtcatcggcgcatgccattttgcaggcctcaatacattcatctgtggtagcgtttttgtcaccccagcgcagattttcgagtatggtgcccgagaaaagcacgttttgctggagcacgacagctaccttgtttctgagagtgtccatgtcgtactcacgcacatcgtggcctccgacgattacagagccggtgtctgtgtcgtagagacggcttatcaggtttacaagggaagatttcgagcttccggttcctcctatgatgccgatggtctcaccggattttatgtctagatttatatctgacagaaccggagtttcagcggtgtctgaatatctgaaggttacatgcttaaagcttatgcttccgtcaggcacatcgtaaagcggttcctttggattgtgcagtgtgctctgctcatttaatacctcgctgattcgtcttgcagatgcgagtgagagtgaaatcattacaaacaccatcgagagcatcatgaggttcatcagaatattcatgcaataggtgagaagagccatcagatcacctgtagtgagagtgctgcttaccaccatatgagctccgagccagcttattaacaggatgcaggcatacactgtaaactgcatgagaggagagttgtataccacaaggctttctgccttcacaaatacgtcgtagatattctgtgctgcctttgaaaaacgttttttctcataatcctcacggacgtatgcctttacaacgcggatagcggatacgttttcctgtacgctttcattcaggtcatcatagcgcttgaaggctctgtcgaagtatttcatagccgccttgctgatgaaaagcagtaaagctccaagcacaatgacagcgattaagtatattgtcgcaaggcgagggctgataaaaaatgacatagccatcgcacatattatggatgcaggggctctcatagccatgcgaagcagcatcatgtaagcattctggatgttggtcacatcggttgtcatacgtgtgacaagactcgcggatgagaatctgtcgatatttgcaaaggaaaaggtctggatgttgcggaacattgcagcacgcagattctttccaaagcccatggcggcctttgcaccatattttgcaccgagacatcctgtcaaaagaccaaacagtgctgcgacaatcatccacacacccatgatatagatatgccttgtgtcgcccatattgacaccgttgtctatgattgatgccatgagaagagggattatggtatccacagccacctcaagcagcatgaaaacaggtgtcgcaatcgaagcccatttgtattcctttatttgggcacctagtgtttttaacatatgttttgtcctttcttcttatttatatttgattaaaacaaacttcccacatttatggtaatgtggttaactaaaaaaatacttgcatttaattagttagtgtgctaactatattatagatatactttttttattgtcaagaaaaatctatgaaaggatttcagatatgaaggagtttacaccggataaatacttaggacacaagataaaccgcatcagcaggagcatagacagatattttgacagaaaaaggtgcagtaaaacagaatgtataccgcgaagccagggtatgatgattggatatataatggataatcaggaccaaaatatatttcaaaaggatatcgaagcaaagtttcatctgtcaggagccacagtgacaaatatgcttaaaagtcttgaaaaaaacggctatatcgtgcgcacacctatggaaaatgatgcaaggcttaagaggattgagctgacgaaaaaagcactggaccacgaaaacagggtgagggaaaatataatggtaatagaggaagccatgcacgaaggcttttctaaggaagagtttaacatgatgcttggctttttggacagagtgattgacaatatggaaaagcttaacaattaacaaaataattacagagttgaaaaagtagcataaatattgtggctttttttgtgcaataagtcaaaatgctacaaaatattgttgagcgtattgacatagcaacaatatcttgtataatttagattgtcatcaaaagacagatgcacagatttgtattaaataatatggcattttatatgtagctatattgtaattgtttggtgaaaagcccgctttacattgcagggcagtgacatgaattaatgattacatctcatttatagctgcatattttgtgccattacacatgataaaatacatatatatggtatgcaatgtaaataatgatactatatatagtgtagcgtattttacagcatttagtatacagagaggagaaattcacatgaaaatcatcaagcgaagcggcagtgaggacatatttgatgcagccaaaattgtagctgccattagaaaggcaaacaattcagtgctggactatgagaagcttactgctgatcagattgaggaaattgcaagcaacgtggagactgcatgtgagaacatgaagcgctctccaagcgttgaggagatacaggatatggtggagaaccagctcatgaacaagcgtgcctttaccgtagccagaaactacattacttacagatataagagagccatcgtccgtaagtcaaactctacggaccagcagattcttagccttcttgagtgcaataacgaggaggtaaagcaggaaaactccaacaagaatcctactgtaaacagcgtgcagcgtgactacatggcaggtgaggtgagcaaggatatcacacgccgtttccttcttcctgaggatatagtggaggctcatgagaaggggcttatccatttccacgatgcagattatttcgcacagcatatgcacaactgctgtcttgtaaaccttgaggacatgcttcagaacggcacagtaatcagtgagactatgattgacacaccaaagagcttttcaacagcctgcaacatcgctacacaggctatcgcacagattgccagctcacagtatggtggacagagtatctcgcttgcacatctggcaccatttgtacaggtcagtcgtgagaagttcagaaagcaggtgctaaaggagttcgagagcgtaggacttgatttggatgaagaaaaaatcaatgaggtagcagagcttcgtgtcaaggaagaaatcaaccgcggtgtgcagatgattcagtatcaggtcattacacttatgactacaaacggacaggcaccgtttattacagtattcatgtacctgaatgaggtatccgatccgcagacaaaggcagatcttgctgcaatcattgaggagatgctgcaccagagaataaagggcgtaaagaacgaaaagggtgtatatatcacaccggcattccctaagcttatatatgtgcttgaggatgataatatcacagaggattcaaagtactggaatctcacagtgcttgcggcacagtgctctgcaaagagaatggtgcctgattatatttcagagaaggtcatgaaggagcttaaggacggagatgtgtatacatgcatgggctgccgttcattcctcacagtggacagatgctcacagacagcgggaaatgtggcacatgccaagaactttgatccaaacaagcgtaaatactatggacgtttcaaccagggtgttgtcaccttaaatctcgttgatgtggcatgctcatcagaaaaggatgaggaaaaattctggaagatacttgatgagagacttgagctgtgtcacagagcacttatgtgcagacataagaggcttcttggtaccaaatccgatgtagcaccgattctctggcagaacggagcacttgcacgtctgaaaaagggagaggttatagacccattattatttaacggatactcaacaatctcactcggctatgcaggactttgtgagtgtgtacgctatatgaagggagtatcacacacagagccaaaagagggaacaccgtttgcacttaaggtaatgcagcgcttaaacgatgcatgtgagcagtggaaaaaggagtcaaacatcgatttcagtatatatggcacaccgcttgagtctaccacctataagtttgctaagtgcttacagaagcgctttggtatcatcgagggtgttaccgacaagaactatattacaaacagctaccatgtgcatgtaacagagcagattaatgcatttgacaagctaaagtttgagtcccagttccagaagctgtctccgggtggcgctatcagctacgtggaggtaccaaacatgcaggacaatatccctgcagtgctttcagtaatgcagtacatttacgacaatatcatgtacgcagagctgaatacaaagagcgactattgccaggtatgcggctacgacggagaaatcaaaattgtagaggaagagggctcaggcaagcttatctgggagtgcccacactgtggcaatcgtgaccagaacaagatgagtgtagcccgccgtacatgcggctatatcggcacacagttctggaatcagggaagaacccaggagattaaagagcgagtgcttcatctgtagaagttaaaggaattgtatttgagacagaccattctaaaagcacaacataaagcataagaaaaaaataaaaccgtcgtaccggaccttaaatggcatggtacgacggttttacttatgttcttaaatgattaattattttaattactcgtcaaatttttgagccttatcgaagagctcataaacctcttttgaaggttcatttgtgcaaagtgtcacaactacggctgcgataagtccgaaaacaaatcccggcaacagctcgtagattccggttgatgtgaggaatgcataccacaatatatcaacggcagcacctgttatgattcctgcaacagcacccttgaagttaaagcgcttccagaagaggctgagcatgattgctggtccaaaggcagctccaaagataccccatgcattggaaacaagtgccatgatagagccggcattagggtttgaagcgatgatgagtgctgcaacagcgattccaagaacgacaatacggccggtccacatcatttctttgtcacttgccttaccttttctgatgacaggcttgtacacatcactcgagaatgctgatgaagcagcaagcagctggctgtctgcggtactcatggaagcggcaagcactgctgagagcagtatacctgagataacacccgggaaaatctttcttacaatctggatgaaaacaagagagttttcattgattgattcgtcaaagccaaggaaaagtcttccgattactccgattaaagtcgcaaaaaatacaataagtaaggtccatgtgattccgatttttgctgattttttcaaatccttctgtgatttgatggacatgaatctgataatgatatgtggcataccaaagtaaccaagtccccatgccagtcctgacacgatatcctgccagcttgagaatggatttaagtaaccgcccgggagtgctgatgtagatgatgtatcaagcataaatgctgcaaagatcggtgctataaacatagaaccaagcacgagcatgccctgaaaaaaatcggtccagcatacagccgagaagccgccgaggaaggtatagcctacgatgacaactgctgcaagatacatggcaatctgtggatccattcctattacagtgtggaaaagggtaccgcatgcctttacgcttgatgccgcataaatagtgtatgcaaccaaaaacacaattgcacatatcacctgcagtgcaagtgatttggacaggaatctgttggtcagatactgcggaatggtgattgagtcgtttgctacaatcgagaattttctcagtctcggtgcttcaagcagccagcttatagtgtagccgattgcaagtcctacaggaatccatacctgacctaagcccagcgcatagatagaagtaggaagtcccatgagtacccatgcactcatgtctgaggctccggctgacagcgccgcaacccatggtcccatctcacgtccgccgaggaagtaggtcttttctccgccgtttctgtttttcacgaagaagaagataccgatacccagcatgcacaacagatagacgataaatacaataatttctgatgttttcatttgtagtacctctttaatagtttatttagtaaccatgctaccacgttagcgtgataaaggcaagaaaaaattaatgataaaaaaaatcgataggtatttttttcgtggactgttattgacataaaacgtgatttaaaataaaatgtcgaagttagcaaaaactaatctaagatagaaaagtgatacataagttagcgtaatatacgtaagttgacaatatatattttttagataagaggtaataaggtgaaaaataagatagcagttgcgatattactgacagtcgcattggcagtgaccggttgtggctcaggtggaagtgatgcgacagagaatacaacagcttcgcaggaaggaataaatagtgatttaaaatcagcaaatgagtcctcacaggaagtatttgcaatggatacatatatgacagtgactgcatatggtaaaaatgcgaaaaaagcggtggatgcatctatagaagagataaagcggcttgatgcattgctttcaacaggagatgaagacagtgaaatagcaaagttgaatgtgaataagtcagccactttgtcagaggatgggggatatctcgtgcagagaggaattgagcttagtacgatgactgatggagcctttgacatagcgatatatcctgttatgcaggagtggggatttccgacgaaggactttaaggtgccggatgatgcaactctaaaagagctgctaaagcttgcggatgtttcaaaaatagattacgacaataaaagcagagagatttcctttgaggatgcaggtatggagatagaccttggtggtattgcaaaaggatatacttcatcaaggattatggatattttcaaggagtatgacgtggatagcggtcttgtgaatctgggaggcaatgtccagacttaccgaaccaagactgatggcagcaagtggagagttgctgtgcaaagcccggaggatgaaagtcagtatataggagtggttgatgtgagcgacaaggcggttatcacctccggtggatatgagcgttattttgagcaggatggaaaaatctaccaccacatcatagatcctgctacaggctatcctgcagagagcggacttaaatcagtcactattgtgagtgatgatggaacactcgcagatggattgtcaacattgctgtttatcatgggaaaggataaggcgtgtgagttctggaaggcacacagtgatgaatttgatttcgtactgcttacagatgatgacagcatgtatatttcagaggggatagcggatgactattcatctgactatgagtatgaggtaataaatgcaaaatagagcagagcaaaagtaatattgtacagatagcggtgctatcggaaatataagaggtatatatgaagttcaaggaagttttggaaaaaataaaggtatatgcaccacttggagtgtcacttgtgattgcagcatgtgtggtgatttcattgagtggatatcagacaaaggcgagtgaaccttcgaaggataaaaagcaccaggtttcagagagggtgactgatactgaaacagagaatgctgcagaggatacacaaacagccacaggctcgttcgaacttgcagatggtgtgtacaagggctctgcgacaggctttagcggacatgtgacagtggctgtaactatcatggataagaagattacttccattgatatcctttcatctacggatgatgaggcatttttcaatagggcaaaggctgtaatagacaggattatagcgtcgcaatcttttgatgtggatgttgtatccggagctacatacagttcaaacggaataatcggagcagtgaaaaatgccctgacaggtgagaaggataatggtgttacaggaaaatcaaaacagggaagcacatcagagtcagaatctgacagctctttggcagagatagcggctgtacaggacgcatccgcttacaaggatggcacatattacggcaccggaaaaggctttgcgggcactatgaaggtaaaggttgatatatcaggcggtaaaatagcctctataagcatagtcagcacaaaggatggtgacagctatgtaaagatcgcatcatcgctgcttgatacaatagtcgaaaagcagagcactaacgtggatacagtctcaggtgctacattcagctcgcgtggaatcatagctgctgtaagaagtgcactgagccaggcggctgtgagtgataatacaacgggcaataatacagataaacagggtgctgcagaggtatcgggaaatggacagactgatgaaaattcatccggcagtgcatctgaacagggcacagaaggtacacttccgtatgttgacggtatatactacggcacagcagagggctacaagggtgacataagggtagcggttgttatccaggacaagacgcttaaagcgattcttgtcactgaaaaacaagatgatgagccttttatcactaatgcaatggatgtgttaaaaaatatgatgaaaaagcagagtgcggatgtggatacggtatcaggagccacctacagctcaaagggactcataggagccgtaaaggcagcatttgaggaagcgcgaaagacaactgcaggtgagaataccggtggcagcaattcagatagcaataacagcaatgataataatagcaatattgcgggagaagaggacaaggcagtcctgttgaagcttgtgcagtcgcaagcatcgcttgacggcgcacagtacacacagcttagctggtatctgcttcagatacgtctgggggatgcacaggaggtattggaatccgcggagtcaactaagaaggatgtaagctgcgcacaggagaagcttcaggctgcaataaatgcacttcagaaaaatgatacatccacaaatgtatacgaggatggcacatatgatgtatctacactgtgcataccggatgatgacatggactttagtgcatataatctgagcatgaaggtgactatagcaaatgacaggatagtttccattactgatgtaaagggagatggagattcacaaaatgtttcttatataaagaaagcggtagatggtacaaaaaatcaggccggtatggtttctgttcttacatcacagacaaatgcagacagcattgactttagcagtattgatactgtttcccatgccacatgcacatcaaaggctataattgatggctgtaagagcgcacttgaagctgctaaaaagaaataaaaccgcaaggacatttacaggatggagataacatgcaggaattttggatcagactggtgagcctgtttatagttgtatcgtcgctttggggatacaacatgacaatagataaaagagaacaggaaaataaaaatacgcagtatattgctgcagaaactgaaagcacagacagtcaaggagcttataaggatggcacatacacaggcagtgcagagggctttggtggaaatgtagatgttaaggtgacaatcgaggcggggaaaatatcatcggttgacattacagcggcagagaaggaagatggcgcatacctggcaatggcagaggatatcataccgtccatcatttcggcacagtctgcggatgtggacacggtaagcggtgcgacgttcagctcaactgcaataagaaatgccactaagcaggcacttgataaggcggtgaaatagatgagaataaaagatatgaatccaaagcttcgaaagagaaagatacagacatggtttcgtgcaggaatgcagcttttattttttatactttttccgtcaatgttcacggcagcgttcaatggcgtcaagtatatttttacacagattggctcaggaaacagaattgaacttacatcatttgtagcggttcttctgatgctttgcgtgtacacaatgatattcggcagattcttctgtggttttgcctgtgcattcggaagctttggcgacgcgatgcatgcactatatgtgtcatgctgccgtaagcttaataaaaagccggtgagtataccggcgaaggctgcaaaaaagcttacatatatgaaatatgtgatacttacaatcatattgatattatgctatctgggagtgtatagctcattgaagggcacaagtccgtgggatgttttctcaatgcttcgggcaggaaatttaggtcttgcttcatatatcacaggagcagtagtgcttgtgcttataatcatcggtatgtgtgttcaggagagatttttctgtcgttttatgtgtccgatgggagctgttttttcaatactccctatagcagctacctttaccttgcacagggacagggcaggctgtataaagggctgcggtgcctgtgagaagatatgtccgtgtgacataggcttgccggatgatggctcaggcaggatatcaggtgactgcttccagtgtcagaaatgtaacggaatatgtccgaagagcaatattcatacaggtataaagcagctgcgtggaaatgagctgtggtttacaggtataagagctgcgatacttatagctatatgtatatggctgggggtgtagcatgcaggtattatggagaactaaactaaatgaaaagaaatatgactaaatcaggaaaaatagcatacggcgccatgcttgtggcgcttgcgatgatattcagctatgtggagagccttattccgataactataggtattccgggtattaagctgggagtggcaaatctggtcactgttcttggaatatttttccttgggccttgtgaggtacttactgtagtgataatgaggatatttctcgtgggctttatgtttggaaatggtgtttccatcatatacagtctggcaggtggtctgctgagtcttacggtaatgcttattataaagaaaacagacaaattttcgatggtcagtgttagcgtagctggtggaatcagccacaacataggacagcttttggccgctgcgatagtgcttaaaagcactgcagttgggtattatctgccaccacttcttgtggctggcacactgacaggacttttgataggaattgttgcacaaaaggtctttcccgcagtaggaataagcgggaaaaattttttaaacgcaggttagagaatactaacttattgagaaaagatatcaattaagtatatatgcttaatattgaaatcggtagcaattgtggattgcaaattagaaggcagccacattaactataaagcattaaaatcttaaggaggaaaaaatgaagagaaagattttagcacagaaatttcttacatttgcactgacagcatcggtgacagccaccatgtttccgacaagtgcatttgcagtgacaggcagccaggtggcggctgacgggacgtatagcagcacggctcatgtgacaagaacagaggaagatacagatgatgagtgggatgaatatgatgtaaatgtaaagctgacggtaaaggacggaaagttttcggatataactgtctcacctgaaaatggatatgattctgacaatgactcgtatttcaataaggcatataacaaatcaaaaggtataaagacaaagctggaaggtcaggctgcaacagaagagacaataaacagctgggatactgtttcaggagcaacacgtacatcaactgcggtaaaaaaagcagctcttgaagcaattcagtcagcttcagctaaggaggagtcaaagccggaagaagaaaaatatgtatactgttatgcagggcttacatgggcagagtactgggctgctgagggagttcaggccgccggaagcacagcatcttcaagcgaaaaggattcacataatgaatcggataaaggagcttttgatacggtaacccgtgccactgcaaatcatggccttcacagaggaagcttccagtgtaatgctattgtcgagacagaagaaggtacgacactcaatctttcatattggaagacaggcgaaaataatcagcaaattgctgtcatgacagatggtactgaatataattacaataagggagtatttaccaaagatggaacaactctcaagctaaaggactacaaagtaacaggacttaagtttgtaccggtaaaggtaaaagagtcagactacgaggcatttaaggcaaaatataccgtttacgagaatggtgctgacttaaaaggcggtttcggagagggcaaccttaatacaatagacgagatagcggacgttacagaaaatacaaacggtcttaagactgttacgaagaacgctgacggaagcttcagcttttctgccagagcaaccggaaccgactctggtgttaaagatacttctcttaaaaaagctgatgttacaggtgcagttaaggatgcaagcggatcatacggagagtttttaagagttgattttaacggtaactatggtgatcttggagccaatatgcaggcggttaagtggacatattatggtaatgacagcacaagaaccaaagcgcttgccacatatggaacaaagtttgcatcagataactggatgcataagtctatgggaatccagcttggtctcaccgattcgctcagatgcagcctgccaagtggatatgatggaacaggatactggtctgttacaatttatgcattgggatatgaggactatacatataattttgaggcaacagctgcaaatatagttacaccacaggtaccggcagatgagacttcaaagaaagctctttctgataaggtttcagaggctgataagctgaaccaggagctttatactgacaaaacatggtcaaatatgcagattgaacttaaggaagcaaaggatgctttagcaaagactgacctcatgcaatcggaagcaaaggaagcattatcacacctcacagacgctgtaaataacctgaaatcacagtatgtactcatgaacattccatatgatgagttttacaaggctgatcttaataacaattcagtcgcagtagatgccaccacatctgccacaaagcagaagaccagaaatactctggcagcaggctcatatcatgctgattcagaaggagagcatataaacggtgtaacattcccggtaaaggtcacagatgatttctatgataataataaggattatacacagattacagatgacagtaaggtagatatcacaacaaatatcaagggcaaggtttctacaacaacatatgagggaaagaaggctctttttgagagtgctgactactcatactatgtacttagtgagatcccttcgtactacaagactgcaacagtaggcgcagataataaactgtcatttggcgctgtaaatggaactaagacgcagatagctgctgacaaggtgactacaaagttcaagacaaaaacaaagtacggagactatcagctcaatcttgatggcataaaggatgctatgggctttgaagatgatgatgtggtttacggtgttattgtaagcactgatgacaacacagattatgctatgcgtcatgtggagaatatctggaaaacagaggagcttgcatggagtgtgggaattgttacagatagccatggatgtccgctttcatctgagcattataagtctatggttggaaagacaatcaaaaatgtaacatactatacaagtaagggaatcttcactttacctgtagattacaaggtacttgagcacgctaaggatgcagcagttgaagcagaaaatgcagctgtatcagcaggaaaggctaatcttgacgttacacttccggatgattttaacgcagaatatgcagttacagatgcaaaaggaaatgaagtaaagggatttaaggttacagaggaaaacttagcatcggcagtgtcaacatatgcagcaagctatactcagactaataagcttgtaattacatatccgaaggatgcagagaatacagagtatacgctgacagtatccgataagagcaataaatatgccccaatcactaccacattcgagctctatgcagatgcagtttctgcggcatacaataatgatgcaacagcacctaagcttgtagtggcagatggtgcatcagcagcacagtttgcagattttattggaaaaatcaagtctgtaaatgtaaatggtaaggattatccggcaacaggcaagggggcagtaaagcttatcaaggaagatggtacaattgatactactcaggctccgtttgctgagggttcaagctttgaaatcaaggtatcagcaacaggatataaggatgagctttcatttacatatgagaagccagcagtcattgaaaccaaagcgcttgagagtgtaattgaaaaagcagatacactaaaagaggcagattacacagcagacagctggaagacattctcacaggtgctttcaagtgcaaaagcagtactaaagcagaaggatgaccagacaaagattgacaatgcagttgcatcactcaataaggctattgaaggcctaaagaaaaaagaagctgtaaatccgggaacaccgggaagtggtgcaggaagctctaatggaactggtacgaatgcaactgtagcaacaggcagcaagtcaaattctacgactactgacacaacaggtactgcagctaaaaaagctacagtaaagaaggcttcaaagacaggtgatacaaaccctcttatgggcatgctcgctttggcgtttgcatcgataagtcttgtgggagcagcactttttgcgaaaaagccaaaccgaaaataatttaaacttccctattgacgaataccctgcgttgacatatcatagtatataagtgaaagggagtagccggcacgaaagtgcttacttatccgtcagtacgattgctcatacatatcatacatatatgacagcaatccggagagtgattaaatggcgagacttttgttgttttatacagcagaagtgtcgccttttttgtatataaaagtcttctgctgataagacatagatgtatctatcaattaatcaggcatccttaaaaaggacagcagaaggaggaaaattatgatttttgtagcaattttactgcttatagcaggctttgtagcactggtgaagggtgcggatgtgtttgtggatggagcagcggcgctcgccgggaaatttggtattccgcagcttgtgattggactgacgattgtggcgatgggtacgtcgctgccggaggcggcagtcagcatcactgcaggaataaagggtaatgcggggattacagtcggcaatattgtcggcagcaatatactaaatatccttataatcctgggagtgacggcactcatcacaaatgtagccatacaaaaaaccaccttcaaatacgagataccgtacatgcttcttatcacagcggtgcttctcgtgatgggaatgacaggcaatgaaatcacattcattgagggtgttatactgtggattttatttattgcatatctgctttatttgtatattttggcaaaaaagggcaatgacagcggtgatgagcagtcggtaaagctatatccggtatggaaatgtctgctctttattgtgctgggcggtgtgtgtgtcgtaattggaagccagtttgtcgtaaacggtgccacgaccatagcaagagcctgcggcatgagtgagcgctttatcggactgacaatcgttgcattcggcacatctcttccggagcttgttacatctgtttcagcagcacgcaagggaaatgccggtatagcgattggaaatatagtcggcagcaatattttcaatatactctttgtaatcggaacagtagctctcatttgtccggtaccgtttgagagcaggtttgtgattgatacagttgtggcaatcctgtgcggtgtgctcttgtggggcggtacgataagacataaagagcttagaaagccatgtggagtggtgatgctgctttgctatgcggcatattttgtatatttggcagctatgtaatgatgtatttttttgaattgcgatgactgtgtttaaaaagagtgtgatgaagagataataattaaatttagcaaactgtcaataattgtgcatacaaatcgacattttgacattaaaatgattgagatttcacgctaaatataaataattaattaaaaatagcactcttacttgacaagtgctaattgcaggtgtataacgtagtcagaacgaacggaaggaagcgattataatggataaaaacccaaagcatccattgaagaaaaagaataaggcagatgcaaagaagcatcagaagcatgtatacgaatagcaccttccactaaggaatactatccagtaagcacaatgtaccccagcccgtcacagggttggggtattttgtgtttttggaagtgttttcagagacagcccgtgaggcagttgtaaatacattttcaccggcaccttttatgagagaagctttaagcttgtcgccatacatatagaggtcatttccacgtacaattccccattccatcaggagcgcagccgcaccggtcacaaacggtgcagccatagatgtccctgtttttgaagtgtagcctccggtgtttgagcatgaaataatgtctacaccgggcgcaatgatatcaggctttatgctgtcaaaggcccaggtatagcctcggccggaaaaggcggctgtgcggtttgttcggctgtcataggctccgacagatatgacattttgagcggttgaggggatggtcagggtgatatcaggcgatgcatggataaatgaggtctgtgcattgcgcagagcacctgacggcagccatatatcccatgagccgtcctttacagatatgggttcaagtgatattttccagatgccgggtgagatgtattccgatcccatgagttcaatgaatatttcctgaaaaggagagtagggagagggaccgccgcctgttatatatatgtctgtcccatcgagattgtatctgtatgtaaagccttttgcctgattggtaattgtatcgggaatctccagcatatcattatttggtgcactaatgcgcagctgtatctcatcccagtattttttccataaatcaatggagagagacggctcaggatagcctatcgcaagctctgcatcggcagggtatgagatgccgtttgcatgaccaaagccggctccatcgttacctgagccgactgagacagcgcagcggtagtttcctgctatatagtccaggtatgattcaagcagtgaggtgccgctgtgcgagccgttgcttgtgccaaagcttaggtttatggcgataggcatgttcatatcgattgattttcttatgcaaaagtccactgccagcataatctgcgtggttgtgggaaagctggcaccgcctgaggttttgagttttacgattataagagtgctttcataagcaacaccgcggtattttgtgttttgttcattaccatttccgtttccggcagcgattcctgccacatgagtgccgtgtccggatatgtcgatgcttgggcagatgcgctgcatttctaagctgttttctgcatttatggctttggtgattgtatcgcggtcatataaggtgccgaaagggatgatatcactgtgtgaggaatcatcggaaacagtctggtcccacagataggcgattctgcttacaccatcctgtataaaagccggatgggcatagtaaattccggagtcgataatgcctacgagcacactttttccggtcagattatatggattggtgtgtacgggagtgatgcatgaggcatgagagccctcgtacacatcgtagttaaactgctttggcttttccatatatatgatttcatcgcacagggcaacggtatttacaagtgatttctcaattacgagcaccgcatagtttccgagcagcctcgtgatgagtacagaaggatacttttcttttattttttcgatgtcaccgacatattttactatcacttcccagctgtcactctccggcagatagccgcttgaaagccctccctcttttccaagctcataaggggtggacaacagggcggcggacagctgtggagaaattttctcactaaatgctatttccatactaacctccattttttattagtaaaatattaaaaaaatcttaaaagacagatgcaatatatatttggtatgattatgtcataatagtaattattcagaatcaccccacgcacatttgcaaaatcgcacgatactcgtgctttgtctacactccgttacggtccgcgctgaacaaacgtcccccggacgtttagcgccgctgctacgcagctaattttgctcatatgtgtgggggtggctctattcgagccaccttgagaacaagaaaacctgctgcttacatgcaagcatgacgcatcagcttttttgttctcagtggttctgaatagttacttataatcaattaattataagaaacagggaggtcgaaatgagtaaaaagaaaaagataatcatttcagtgattgcagctgtgcttatcatagcagtgattgtgtcagctgttgtcattgcaatgacaaagggaaagaatgcagcaaaggcatcgggagtctatgcaaacaaggtcgctgatgtcatgtatcaggcgggaagtactgacaggtacagcggtgtcgtggaagcagccgataccatggatatcaaggctgacagtgaaaaaacggtaaaggatattcttgtgtcagagggggatgaggtacaggtgggcacacctctttttacctatgatacaaaggatcttgctgcgaaaaaggaaagcgctacgcttgagcttgagagcttaaacaatacgctttccggctatgatgcacagatagagcagctcaccaaggaaaagaaggaagcgccaaaggatcagcagcttgactatacactgcagattcagcaggcgcagacacagcagaagcagactcagtacgatattgccacgaagaaggcagagatagaaaagtatgatgagagcatcaaaaatgccactgtaaacagtacaatggtcggtgttgttaagaaaatcaatgagaatcagagtgcagacacagcagatactgcatttatgacaatcgttgccaccggtgattacagggtaaagggcacaattgatgagcagagctttttaaacagtgggctcgcagaggggcaggcagttatagtgcgctcgagagttgatgagtcaaagacatggcagggtaccatcagcaaggttgatactgagaatcctcagactgataacagcaattccggcatgtatgatgatggaagcagcgagcagaaggcatcaaagtacaacttctatgtgcagcttacaggcacaggcgacatgcttttaggacagcatgtatatgtggagccggatttcggacagacagaggtgaaggatggtatatggattgatgagagctatgtcgtaaaggatggcgatgatgcatatgtatggacacttaataaaaaggataagcttgagaagacaaaggttgagcttggagactatgacgagaatctcatgatgtatgaaatcaagtcagggcttacaaaggatgactatatagtatgggcatctgatgacctttatgagggtgagccggcgcagacatgggaagagtacgttgaaaatggcggcggtgaagattcagtctatgacgatatgggtacagaagctcttgatgaccagatgcttgagggcactgagggcggtcctgttgatgatggcacaatggacgaaggtgcagcagatgccaccggttcaggtgacgcggaggtacagtagatgattctagaactccagcatatttacaaaaactatgaccaggataagctcgtggtgccggttttaaaggatgtctcacttcagattgatgagggagagtacgtggcaatcatggggccgtctggttccggcaagaccactctcatgaatatagtgggatgtcttgatctgccaacatcgggcacatatatacttgacggcagacctgtcagtgagcttaaggaaaaggagcttacgagagtaagacgggatacaattggatttgtatttcagaatttccagctcatgccgagagagagtgcattggacaatgtatgcctgccactcatatatgccggtgtgagcaaaaaggacagaaggcagatgggtatggaggcattagagcgtgtaggtctttcagacagggctgatttcaagccaacacagctttcaggaggacagaagcagagagtggcgatagcgagagctatggtcaatcatccaaagcttctgcttgcggatgagcctacgggagcacttgattcaaagtcaggcaagcaggtgcttgagctctttgagagccttaatgagttcggtgtgacggttgtcgtgattacacatgacagaaaggtagccgagcaggcaaagcgcatcgtccacatcatagacggcgagataacagaggaaggacaggaggcaggtaatgaaaaagaaaaagagaattaagatcattataatagctgtccttgtagttgcagttgcagcgggaagcatcacaggagttgtttattacaggaactccaaggggcttgcttccgtcatgagtgtttcgatgatcagcacgacaaacgactacacatccatgaccagtgggggaatggtgtgtgatgatgcatgtcagacaatcaatttaaaggatggacagaaggtgacagaggtttatgtcacaaaggatcagcaggtaaaggccggagataagctccttgcatatgatgtgacgagtctttcgctctcggttgagatgaagcagcttgagatacagagtcttgagaaccagcttgcatcggaaaagcagaagcttgacaagctaaagaacactaaaccggttgaaaagcagcccgagactcctgttacacctgagccacagcctgacacacagccgtctgcgcctgagcaaacgcctgatgaacagcatgatgtgatatctgatttgtcagaggccaaaggaagcggtacagaggacgatccttatgtatttacatgtacagaagcttcatatgtatcagggaagcttttgaatacactctcagaaaagagcgcggtagcgcggtttgtaataggagatgcggatgcacctgatatggagcttatcgtaagaggagataggcttggcggctatgatgaaagcgatgagataaagcttttccttgcaggcacaactacagcaggagatgcttctgatgatacggaaggaagtgagccgtcagataccaaaacagacagtgccacagaacagaccgcacagacagaagctgataccgcggcagaagaaaagacatacactgcagatgagcttaaggatgccataaaggagcagaccagaagtgttgccgatgttgatttacaaaagagaattgcacaggctgatttaaaggaactgcagagcgagcttgaggatggcgtggtatatgcaaagaaggatggaatcgtgacaacagtctgtgatcctgccaatccaccgcaggacggtacacctttcctgcagctttcgggagcatcgggactgtatatcagcggaacaatcggtgagctggatctggatacggtaaaggtaggacagagcgtatcagcagtcaactacatgacaggtgatacctatgagggcacgatatccgagataagcaatgtgccgtcagacagcgtaaactattatggagacagcaatccaaactcctcattctatgagtacactgcatacattgagaatccgcagaatctcaaaaagggcgattcacttgagttgaccatagatacatcatcggagggctctgacagcggactatatatcgacaagtcatatgtcagaaccgagaacggacagtcatatatatacaaggatgacaacggaaagctcaaaaagcagtctgtcaaaacaggcaagtcactctggggctcatatgtggagataaagtcaggtctgacaaatgatgactatatcgcattcccgtatggagtcagggagggcgagaaaaccaaggtatccgaagatggtatgtattagtttagcagggaggattaaagatgcttgaaaatattagattgtcctttaggggaatctggtcacataagatgcgttcgtttctgaccatgcttggaatcatcatcggaattgcagcaattattgcgattgtttccacaattcagggcacaaacgaacagatagaaaagaacctcataggttcgggaagtaataacgtaaaggtcacactgcagaaggatggctatgatatggatctatcatatgatacggcgccggcgggagtgactgagatatcggctaccacacttgacagcataaaggagctcgaccatgtgcaaaatgcagctctttaccgtacaagacaggcttccaatgcagtctattatctgaacacggcactttcgggcggcaatataacaggtgtcgatgacggatatttcgatactgcaagctatgtagtcatgaagggcagaggcttctcaaagaatgactatgcaaaggcccgcagggtggcactcatcgatgagagcgtggagagcagcctgttttcaggagagagcgcgctcggcaagacagtagagatacagggatatccgtttacagtagtcggtgtagtcacggaaaaggacagctatgacctggtaataaactcaattgatgattactatatgtatgcctatgatgacagccagggcaatgtatttgtgccaagcggaacatggccggttatatttggttatgatgagccgcagaaccttttgcttaaagcagacagcacggataccatggctacagtgggaaaggctgctgaggagatacttaacagcaatttaaatgtcacagacggctctgatgtggcctacaaggcacaggatttacaggagcaggcaaagcagatacagcagctcagccagtcaaccaatatgatgctcatatggatagccggaatatcactgctggtcggtggtatcggcgtcatgaatatcatgcttgtgtcagtcacagagcgtacctcagagataggacttaaaaaagcaatcggagcaggaaagggagcaatcctcggtcagttcctcacagaggctgttgtgctcacaagccttggaggtctggtcggagtgctggtcggagtgatactctctaaggtcatctcaatgctaaacggcacgccgacagcgataagtccggcagcagctatacttgcggtgcttttttccatggcgatcggaatcatattcggtatgcttccatcatacaaggcagcgaacctaaaccctattgatgcactgcgccatgagtaattcttattgaaatcgctgctattgtgaaaaaaataacaattctttgtattttgatgaatacaagggtagaaaaagtttaaaaaattttgtaaaatgttcctagtagataaatactgtactaggagcatttttttagaggaatcaggtcatgtgatatgggaagtgtcatatggtataatgattcttctaagtatgtaattaattaggtaacaaaatatacattattttaaggaaaaggagataatatgtacgctgacgaaaacgtaatcaaaatcaaacatgcagttttgcttgaggttgcaaaggctgcatttgcaggtaacctcgatgagatcagagatgacatcccatttacacttattccgggaccgacacctcagttccgttgctgtatctacaaggagagagaaatcatccgtcaacgtgtcagacttgcagagggtaaagcaccaagcgcaaacgatgacggcaatatcatccaggtaatcagctcagcatgtgaggattgtccgatttcaagctacacagttactgagaactgtcagaactgtcttggcaaggcttgtatcaatgcatgtaagtttggagcaattgaggcaggacgtctccgttcacatatcgacccacagaagtgtaaggagtgtggacgctgtgcacaggcatgtccttacaacgctatcgctcatttaaagagaccatgtaagttctcttgccctgtaaatgccattacatacaatgagtacggcatttcagtgattgatgagagcaaatgtatcagatgtggtaagtgtatccatagctgtccattcggagctatcggatcaaagacatacatcgtagatgtaatcgatgcaatcaagtcagagaacaagcatgtatacgctatggttgcaccagcagcagagggacagtttggtgtaaacatcactatgaacagctggaagaaggctatgcaggcagttggcttcaacggttttgttgaggtagcactcggaggagatatgacagcagcatacgaggctgacgagtggcttgaggcatacgaggcaggagagaagaaggttacatcatgctgtcctggatttgtaaatatggttagaaagcactatcctgatcttgctgacaagatttctacaactgtttcacctatgtgtgcagtttcaagaatgatcaaggcaaaggatcctgatgcagttacagtattcatcggaccatgtgttgccaagaaatcagaggtacatgatcagaagatagagggcaatgcagactatgtacttaccttcagcgagattcgtgctattatgaaggcaaagggagtacagcttgaggctgatgatacctcatatcaggagggctcagtatttggtaagcgtttcgcaaactcaggcggagttacagcagctgtaatcgagagcatgaaggaaaaaggcgaggatgttgattgtaaggtttgcaaggcaaacggagcagcagagtgtaagaaggcacttctcctcatgaaggcaggcaagcttcctgagaacttcatcgagggaatggcatgtgagggcggctgcgtaggcggaccaagctcatacaatgacatggtatctaccaagaagttccgtgatgatctcttaagcagagcagatgacagaaagattcgtgacaacatcgccaactaccatatggagacatttgagatgcaccgtaaggagcagtaataaaatgattgttacagcataatctttttaaatcccccgacttgttcgggggatttttgtgattgcggatatctgcaaaaagatatgtggttagtcatattgagaactgaatagtaacaaagatattaaataaattaagtacatattacgactctatcacgggttttcgggataaagaaacaattgtaacacaactgaaatatatgaagccaacattaagaaattctcaaggaatttgcagtagcaaaaaagattgtttaacgctataatagatactgcttgaaataatattatcaggtttgagtaataatatagagagaataattataaaatgctaaagaggattggaaaaatggacaaaaataaaaagatgattatcggcatacttacggttgcaatagttctggtggtggcgtttatagtgtatatcacatgctttgattcacatattgagttcagcagcaagttcaaaaacggtattactgttgagtatggcaaaaagtttgagccgccaaaaatcaaggcgtatgtcagaggcaggcttataaatcgaaagggaaaagagataaaatgcactatagacagtaatgtcgatgcaacaaagataggttcatacgagataaaagtaattgctcaatacggtaaaaaaacagcgacacagaccatcaaggttgaggtgagggataagaaggctccggagattgcattaaatggcgatgcagagatgactgtagaggcaggcagcgagttcagtgacccgggatatacggcaactgacaactatgatggggatctgacagacaaggtatctgtcacaggagatgtcgatacttcaaagccgggagactatgagataaagtacagtgtcgctgactcgtcaaagaatgagatcgaggtcaaaaggactgtgcatgtcacagataccactgcaccacagataaagctttcgggtgatgattttatgtctgtaaaaaaaggtgataagtacaaagatccgggatacacggcaacagacaattgtgacggagacatcacagatagtgtcaaggtatcaggagataaggtagataaggataaggcaggaaagtatactgtgacctatgaggtctcagattcatcaggaaataaggctacagctacaagagtggtcagtgtgtatgatccggtggccacggcagacacagtaaacccgggcaacaagattatttatcttacatttgacgatggtcccggaaagtatacacaggggcttttagatgtacttgataaatacaatgtaaaggtcactttctttgttacaaatacgcatcctgactatcagaacctgatagcagaggaggcaaagagaggccatacagtggctatccactctgccagccacaaatacgaccagatatatacaagcgagcaggcattctttgatgaccttgagcagatgaacagtatcataaaggcacagacaggaaatgatgcgtcaatcatcagattcccgggtggctcgtcaaatactgtgagcaaggattactgtccgggaattatgacacagctcgtaaatgatgtgacagcaagagggcttttatactgtgactggaatgtatcgagcggagatgcaaacaacaagccgatcagcacggaacaggtagtgcagaatgtcatttcaggagtacagagccacaacgtatcagttgtattgcagcacgacataaaggatttcagtgtcaatgcggtcgagcagatcatccagtggggacaggcgaacggttacacgtttttaccactcaccacaagctcaccgatgtctcatcatcgcataaacaactaaaagcaccaaaacaataaaaaagcacaaaaaagaagagttcaaaatgaactcttcttttttaatcatgattcttatatcttattccccaattaacatttttgtaactatcatcttacctaaatatataataaagaaaaaggtacatagaaactagattgcctgagtggtcaaaattatttaactacctcaacgttaacggcctgtggacctttagcgccatcagtgatatcgaactctactgatgcaccttcctcgagagttttgaagccctccatgttaagtcctgagaaatgtacgaatacatcctttccgtcctcggctgtgatgaatccgtaacctttttggttgttgaaccattttactgtacctttgctcatcgaaagtacctccaaataataataatgctgcttacgcaactaacgttagaatagcataacaggtttaagatgtaaagcaataaagtcaaagttctttaaagtttatgtcattatttgctaaaaatttcattacaagcttatcccattcaccgtctaaggtcttatccactgaaaaaatattgtaggatattccggttgtcagagtcagaagtttattctgatacctgatatttatgaaaaaaccactgatatcggacacggtgaaagcagagtgcagactgcttagggtgtgctccatgttttcaggtgaaagcagaaagacaaacttgaatgacgatggagtctgtctgccctttatcaggtcaaagcagtttgtgcgaagcatcctaaatgggagtatgctatagcccgctataccattttcctcaagctctgtggagctgtaaaagcccttttgcaggtgaccgtctatgacgtatgaggctgcctttgtgatgacggcctcctggagcaggaagttgtcaaagatttccgtgcgaagcagcttgttcataaagtcctttgtgtctgtcagttcaattgatatcataaattctcctcattttccacagtgtatgtgacagcgaatgattgttctaagtggttttgaatagctatcgattattatatcatacatcagatttgcggattatgccataaaaataaagcctgttcaactggaataattgtaaagtccgtggtagaataaatgcgttatgcaatgaaaacaggaggcaatccatgaaacaggaaaaattatttgatttactaaaagcggctgtttcaccatgtgagtgtgtgaaggctgcaaagcaggagcttttggaaaacggatttgaggagatagattatacaggtgactggaagcttgtgcgcggtggcaggtatgtcttaaatcaccatgatacgaccatgtttgcgtttactgtaggaagcggctacaacaaaaaggatatggtgcgaatagcggcagctcacacagactatccatatcttcgcataaagccaaatccggattttatgacaaactcatatgcacaggttaatgtagaggtgtatggaggaccgattttaaacacatggtttgacagacctctcggagtggcagggcgcgtggctataaagagtgaggatgtgttcaatccgcgtatggtgctatataggtctgaaaagcctgtcatgattattccaaatcttgctattcatatgaacagggatgtgaataagggtgtcgggataaataatcaggtggatctgatgccggtgcttgattcaatacctgaggatgaaaggaccacggattatttccttagctttctggctagagagctgtctgtggaaaagagcgatatcatagactttgagctcaatacattttgtatggaggagccttgctttgtcggtgtgaatgacaccatgatttcatcgcctagaatcgacaaccagtcatcctgcagggcacttcttgatgccatagaggatggaaacagagctgatggaataaatatcatagcgctttttgatcatgaggaaatcggcagcagcagtaagcagggcgcggcctctataatgcttcacgatatgctcagacgtattttaagaaatatggacctttcggaaaatgaaatagatgagagcatatatgatgccatgcttttgtctgtcgatgtggctcatgcgcttcatcctaataaaaaggaaaagatggatatcacaaataagcctgtcatgggtaaaggcttttgtatcaagcaggcgtgctcgcagtcgtatgctacggatgcacaggctattgctattctatgtcagctgtgtgatgaaaagggcataccttaccagcgctttgtgaaccgttcggacagccgcggtggcagcacactgggctcgattgcaggtacgcttttgccggtaaagactgtggatataggtatacctattcttgcaatgcactcagcctgtgagcttatgggagtacgcgacatgaaagccttaagcgactgtgtgacggcctttttcgggtaccattaaagggcagataaccattatgggaaaataaatacagaaacctcttgcataagtttagttttcgtgttactatgacgtagtaatgaaaactacttgttacggaatgaaataacttttaaaaaagtaatttaaacttttgttatcatatagtgcaggaggaatagatatgtataagattataatagatagctgtggtgagctcacagacagccttaaaaaggatggacatttttgcaatgtggcactcgagcttgatgttgacggatacaggattcgtgatgatgagagctttgaccagcacgatttcttaagaagagtcaaagagagcgtaaagggaccaaagtcgtcatgcccgtctcctgaggagtacatgcaggcttttgagggagaggctgaccatgtatatgttgtcacactttcgggcaagctcagcggctcatacaacagcgctgttttagcagtcaatctgtacaacgaggagcatgaggacggtggcaagcaaatctatgtattcaattcctgctcagcatctataggcgagacactaatcggtatgaaggtgcaggagcttgaagagagtggactttcgtttgatgaggttgtaaagcagacagaggagtatatagcttcaatgaataccttctttgtgcttgagacactagatacattaagaaaggcagggcgattaagcaacctgaaggcttttgtggccggcactttaaatataaagcctgtcatgggttcaaccgatgagggctcaatccagcagctcggtcaggccagaggcatgaagagggcacttaccaagatggtagaggatgttgtggctgccacaaaggactgtgagcacaggattcttgcaatttcacactgcaactgcccggagcgtgcacagtatgtgaaggcttgtcttgagaagcttgccagatttaagaagattgtcattgtggatactgccggcatctcaagcatgtatgcaaatgacgggggcattattatagcagtataaggatatggtctttattttatcggccggatatattataatgatggcatgggaaatttagattacacacaggttttaaacaaaatagaaaacacacgccgtttcggcaatgagccgggagtggtggtgacagcacaggtcataaaggtgctgagagaaaaaggaaagcaaaagcgcacaataccgtatatccatgtggcaggcaccaatggaaagggctcggtgtgcgcttttttttctagtatattaaaaaaagagcatatgagggtaggcacgtttgtatcaccgcatctggtggattttgaggagcgcatcacggttgatgggcgtatgatacctaaggaggatgtcacaaggcttggaaactatctgcttgatatagattttggcataggacttacgatgtttgactactgtcttgccatggctcttttgtactttgaggagcagcagtgcgattatatggtcattgagacagggctcggaggcaggcttgactcaacaaatgcaatcggcaaaccgcaatgtgccgttattacaaagataggatatgaccatatggctatccttggcagtgatatagctgatatagcggctgagaaggccggtatcataaaggaaaacggcacagtggtggtggaacagcaggataaacgtgccatgcaggtgattgagcaggaagcgaaaaaaaagcatgcaaggataatcactgtggagcaaagcgatatagcccgctgcagcggctacgcactgaggctttgtggcacatttcagtgggagaatgcagcagctgcagagcttgcggcgcggtatgtgctgggaaagcgctatggcgggccaaaatatgaaatgcaatatgataagacagagtcaaagagagaggaaacagacctgaataaaaggataaaaagcgctcttgaagaggctgtgtggccggggcgcatggagatagtatcaaaggagccgtttctgctagtggacggagcacacaacagcaatggcgttgatgcgcttaaggaaagcctcatgcagatgtatccgggtgagaaattttgctttttcatgggagtcatggctgataaggactacgatgtcatgatacgtgagattttacctcttgctgaggagttttatacagtgacaccggattcagacagggcactgcaggcatcgcaccttgctgattttatcagaaaagagggagttaaggcaacagagctttcaggagttgatgagattagaaggcacctgaaaagagatacgaaaaatgttgcatttggctccttgtattttattggggagcttaaacagcaccggatataaacaccggaaatatagcaatatcgcttgtgatcggactgctgcttgggcgtccgtttggaagggttaatacagctattgaaaaagtaagaaaaagtcaggccttatcttataatataatagtaaaaaaagctatatagaaacttaagttatggttattataaaaaaatagtactagacatttttttcctattgtactagaatgagcataaatgatagtagacccgatatatgataacgctaggttatatcggatccgtaaagaaacggaggatataaagatggaaaagaaggatatcgattggtcaaaccttagttttggctaccaggaaacagattacagctatgtttctaattataaagatggaaagtgggacgatggacagctcacaaaggatcatacagtgacacttaatgagtgtgcgggagtattccagtatgcacagacatgcttcgagggacttaaggcatacacaacagaggatggcagaattgtctgcttcagacctgacttaaacgcacagcgtcttaaggattcatgtgagagacttgagatgcctgtattcccggaggatagatttgtaaaggcagttgaggaagtagtaaaggcaaatgctgcatgggttccaccatacggctcaggcgctacactctatatcagaccatatattatgggaacaaacgcagtaatcggtgttaagccggctgatgagtatcagttcagaatccttgtaacacctgtaggaccatacttcaagggtggcgcaaagccaatcacaatccgtgtatcagactttgatagagcagcacctcacggaacaggacatatcaaggcaggactcaactatgcaatgagtcttcatgccattgtagatgcacacgcacagggctttgcagagaatatgtacctcgatcctgcaacacgtacaaaggtagaggagacaggtggtgcaaacttcatctttatcacaaaggatggcacatttgttacacctaaatcagacagcatcctgccatcaatcacacgccgttcactgatggtagttgcagaaaagtacttaggactcaaggttgagcacagagaggtgctctttgatgaggtaaaggattttgctgagtgtggactttgcggaacagcagcagtaatctcaccggtaggaaagattgtagaccacggcaaggaaatctgcttcccaagcggtatggatgagatgggacctgtcacaaagaagcttcgtgacacacttacaggcattcagatgggccatattgatggaccggatggatgggttcacgagattaaatgtgattaattaagtgtgattagtaagaatatgcatttataataaagcaccgggtattatgttatgtcgtaatatctggtgcttttgtattgtcttacatacttattttatgtggcataataagacgatttgtgctaatatactcttatatgtatgcaaatgtttataaaagcttggaatagatatataaaagcaaacaaaagagataaccgggggataattaaatggacgagtatgaaaagataagacagagaaagcgcgaagaatatagaaagagacaccgcgcccaggtcagaagaaagcagcttattggcaatggcattgttataggcgtgataatacttataattgcaacgataatcatagttgtagctttaaggggcaaaaaggcaaagcaggaagaagtaaaggcagaggtgaccagtactctttacaatcctatacagccaaagcttgatgtacagctgctgacacccaatccgtattccagaccacagaaggcactagagaaggtaaacggcatagttgtccattatacagcaaatccgggtacgtcagccagacaaaacagagactatttcaatggcctggcagagaccaaaaagaccaaagcaagctcacactttgttataggattagagggtgagatagtgcagtgcataccttgcaatgagatatcgtatgcatctaataacagaaacagtgacacaatatcgatagagtgctgtatagaggatgagacaggaaagttcaacgacagtacataccagtcgctcatagagctcaccacatggcttatggggcggtatgatctgagcgctgatgatgtaataaggcactacgatgtgacaggcaagaagtgtccgctatacttcgtggagcatgaggatgcgtgggagcagtttcacaaggatctggatacatacatcgaagaaaatggtgtgccaaaggaagagacaaaccaaacctgataatatacaataaattaaaggatgatttaaaaaatgaaggaaattatcggaaatctgttaaaaaaagagaacgtacgtcagaatctgagcagcctcagacaggagattaaagatgaaaatgcattagcagaggctctaaaactgcttgcaggagaagatgagctgcttgtgtcgtttatgggagcagacgatgcaaaaaccagaaagaacgcagcgcttctgataggagatcttcatatgtcacagctttctgatgaggtttttaaagcatacgaggctgaacagatgcgctttgtaaagggctcatatctggcggcgctgtcacagctggactgcaaagagctcttgccacagcttatggaacgtgcaaaagagcttgagcatatgacagtcacagatgaaaataggaagcatattgaggaagaattaaacgagataaataaaatcttgattaaatataatgggataaagcaccatacacctgtgctcgagggagtaaaggctgagctgcttctgatgacaaaccgccttcacagagaggtggtacgacgtcagataccggttaaggatacaaagctgcatccgcttggagtgcttgtaaagactgacaatatacctcttatcatgcaggtgcgcacattcagaaaaatgtactttaccatacatgcagcatcgcttctgccaaaggatgcacaggaagcagccgcacttcttgcagagtcagatatgtatgatatattaagacgcatgcaccgtgagggtggtccgttttactatcgtattgagagcacggcagatgcggcgtaccagagcaggcttgcgaaagctatcgatatgcattttgcgggcaggatgatcaattcaccaaatgattacgacgtggtgatcaagctcataccgacaaaaaatgacaatttttttgtctgcatgagattatgttctatacaggataatagatttgcgtacagaaagaatgtgcttcctacgtcgatgcatccgtcacaagcggcacttattgtttcacttgcaaagccgtatcttaaggaaacggcacagatcatggatccgttctgcggagttggtacactacttatagagcgcgcacatttagtcccggcacgcgagatatatgctacagatacctatggagatgcaatcactatgggcagagagaatgctgcgcttgccaaaacaagaattaattttatacacagggatttctttgatttcagacatgactacaaatttgatgagctgattacggatatgccggttcgtaaccgacagaccaaggcggagatggagcttttttacgagaggtttttcgacaaggccgcagagcatctggtatccggcggaatcatagtcatgtattcaaatgagattgggtttgtgaagaaacaaatcaggctgcgtgtcgaataccgtctgcttcaggagacatgtattctcgataagaaagacttttatttgtttgttatcagatatgaggattgatttgcgtgagtttttaggaggaaaaaggcgggtctggattagcttaaatgcataataaatgaaaaaaatatagaaaaataaaaataagtgttgacatatttggtttgatttgatattatatcaaagtcgcgtgagacaagcgacagaaaatcaaatatatgcggaagtgtcggaactggcagacgagcaagactaaggatcttgtgattattgcaatcgtgtgggttcaagtcccatcttccgcattataaaattaaaaagggttaagccttagggcttagccctttttgattttagaagcggaagcggaccttgtccccatgggtccaaggtctccgctccgcttcggtcgttgcagaacagacgtcccccggacgtcttgcaacccatcttccgcactccatcttccgcgttaaaatggggtaagctaaattatacggatttcgttcaaaattgcatattagatcagaaggagaggacaagcttatgagtcagaaaaaatacagtttattatacccggatacaaatgcacaataccggacattgagtgatgtgactatgcatgatctgggaatggatcaaatctgcaaaaagctgtcagcaaaggagcgggagcagaactacatccaaaacgtgatggcgcgtatgtatgcagatccggcggtgacacagtaccgctgcgatattttcgaggatgtccttcaacagaaaaaaatgcgtgatgatcttatggaaatactcgagcgcatcagctttctgagggagtacggtagctttaaccgggaatatgatgagagtgcctgcatctgggatctgttgcatcggctggacgagcttaatgattatatcaagtgtgtggatgcgattcatacatgtctggcagcttcggacattcattccgcaggctttctgggtttaaaagcctatgtggagaaaatctatgcggacaacggatttgcagaactgaaaaaagatatctcagaactgaaaatggacacttcacagcttaagagcattacggtaggtattaacttgaatgaccgctttgaagcggacggaatcggtctgatatctgtaaacagcaaatattttaccaagtccggaatcctgggcaatttttatgaccatattgcgtcaaaggatcggatcaatgaggataccatatggaaaaagaatttcaaatttcaaccgtttgatgtgaatgcagatgcggtgattagcactcatatgcagaaggtgatggatacagctgttatgcggtcggaaagccggggtggcattgtgaagcttcccgagggagatcaggcaaaggatgtgactcgttatacagaccgaatcgtcaaccatatgatttcacatatggtgaaaagagtcagagaagtactgaacaaatatgtttctattaccattaccgacatgacagacttgattccggagctgctctactatatcaaatgggcggagtacattcaaaaattgcaggaacagggctttacctttgctaaagcttctgtatataaagagggagaaaatgaatctgatccgtatatgatgcaggcacgtggaatttacaatttaaagcttgctgtttttgagacagaggagtccgggaatattgtaccgaatgatatggatttcgaccggaataggagagtgtatatcttaacaggtgccaaccgaggtggaaagacaacaattacacaggctgttgggcagttgtttgtgttggcgcagggtggcatatatattccgggaaaagcatttacattttcacctgttacaggtatttacacccatttcccggcagatgaggacaagacattggatttaggaaggcttggggaagaatgtaagcgttttaaggcaatctatgaggaggctgacagcaggagtctgcttttgatgaatgaatcattttctaccacttcgtttgaagaaggatattacattgccaaggacagtgtcagggcaattttacataagggaatgaggactatttataatacacatatgcataagctggcatttgatgtggaggaaatgaatgaagagcagcagaaggcagagcacgcagatgggaaggcgttttccatgatcgtgcacatgaaggggacagagcgctcctatcagattgaagtggcggctccggaaggaaaatcttatgcaagcgagattgcacagaagtatggggttacatatgagatgctggtgaaataaggaaatgagctccaaaatcgaaactttgaaaggtaaaacggtcgtgctttaaactctgttttcatcatccggttcggaaattttataagatatatctttcttgtcaccgggaatatggcgacacagatacttcaatggacaaggcagaaacgatgtcggagaagcttgccagattgcagaaagaagcagaaagccctagacaaaacagtcgaagaacattttacaaagaaatgaggtaacactcctcctcttcaggaattatgtccagtcaatattggtattacctgttggatcgaattattggactcgagaaacatgagcgaatcacagaagatgcgcaggccagaatgctaaaagaggcagttcagacttcgtaccgacgaggtggagaagaaacaacccaaactcagctaaaaagccggagaaaaaccggcaaaaagtagctgaaactgcagaaatccccaaaacagctccccaaaccaagccaaaaagctggagaaaagccggcaaagacctggcaaaaagtagctgaaatcactataaatctcaaaacagttaaaaaaatcaggttattgctgaagcgtatagattcattagtggggtaatacaatatattaaggggcaaaataataatccaaaacataaatggtatttgaaaatttagcagaaaatatattgactttgtgaatgaaattaagtaatatatgcacatagaacaaaaactttcgaggtttttatcagaaatggtgcttgcaccaagtttgggtttgaaaaaagtccgttacaatatacagagatgttatgtgtattgtaatggactttttagttgcggaagtaagaaacgatgggctatgttgcaaagatagtctatgataaagataatcgtgtaacagaagagaacgatgcacatgggaaaataaaggaaatgagaaacagaatgagaaaaatagtagcagctacagaagaaaataaagaagaaattttaaaattgtataagatacagctaggcagggagttttgtccatgggacgattcttatccgggaatgaaggagattgagtttgatcttggtagagaatctttgtttgtaatgattgatgggcaggagattaatgctgatgccggaagcaaagaggacagaattatcgcagcgatttcaattgatgatgatccacaggtggagagacttgattgttggagccacaaactggcacccggagctgagctttcaagacttgcggttcatccggattttcagaatcagaaaattgcgagacaaatgctggtatttgggatggaagagctcgcaaggagaggatacaaaagtgtgcattttttagtcaacaagctcaatgtgaaggctctgcgctcgtatgcagtgtttggatttgatacagtgggtgaatgcagcctgtttgggcagccgtttttgtgctatgaaaagagcctgtaaaaaaatatgatttttttgaaaaaagtgcttgcatttttgaaaacaatctgatattatatacgagtcgcgtgagacaagcgacgaaaacaaaatacatgcggaagtgtcggaactggcagacgagcaagactaaggatcttgtgattattgcaatcgtgtgggttcaagtcccatcttccgcattataaaactaaaaagggttaagccttagggcttagccctttttaattttagaagcggaagcggaccttgtccccatgggtccaaggtctccgctccgctacggtcggcgcaaagcagacatcccccggacgtcttgcaacccatcttccgcaaggctccggtcgtcgtggtagagcaggcgccctatattgattgataagacaggaaaggtaagatttttatgattagatttaataacgattacaaccgcggtgcatttgattgcattttgaaggcactggcggatacaaatacaaccagctatccgggatatggtgaggatgagtggtgcgataaggttgagcagattattaaggggcttattggcagagctgattccatgattaaatttattccgggtgcgacacaggcaaattatgttgtggttgcggcggcgctttcaccggtgcagagcgtgattgcagcggatacgggacatatcaattgccacgaggcagcttctattgagaatacaggtcataagattcttgcgcttcctaacacggatggtaaaatcagtgctgcgcagattgaggcatgtgccgcagagtattatgacaatgcaaagcctgagtatctgacagagccaaagatggtttatatttcatttccgactgagcagggtactctttacacgaaaagagagctttgtgatatcagtgctgtctgcaagaaatacggcatgtacctgtttgttgatggtgcgagaatgggctatggactgggctcagataaaaatgaccttacactttgtgattttgccatgctttcggatgttttttatatcggtggcacaaagtgtggtgcgctctttggcgaagcgctggttataaatgctgaggatatcaagtatcgttttaaggcttatatgaagcaaaacggtgcagtgcttgcaaagggctggctgatgggcttacagtttgccactatgcttgagaatggcgattattttgaaaagacaaagcgtgccgatgagcttgccatgcagattaaagcagcatttgaacagaagaaggtaccgttttgggttgagagctttacaaatcagcagtttgtgattttatcggatgagcagaagaagacgcttgccgagaagtactattttgaagagatggaaagagagaaggatggcactgtagtgcgattctgtaccagctgggccacaaaacaggaggaggttgatgcactggttttagatatatcaaagctggtgtagtaacagatttatagtttttcgtacatttcgtatagttttttaaatttatgcttgcattcttctaaactttttggtagaataatgcttgttcgcaggagtggcggaattggcagacgcgcaggcttcaggtgcctgtggtagcaatatcgtgtgggttcaagtcccatctcctgcattaacagggaagtcggtgaacggcttcctattttattttgtgcggataattttgaaagcctattggctattaatggtctgtaaccgttgcctgctacactgaggggtacagctgtcacaggaatttgattattatattggagatgggattgcagcgtgaagagattgaatctatcttatattaatgtaatatgtgtgtttgttttgtcctttgctgttatggagtatgtaaatcttttgattggcagagtgggcggatttccggtgcttgcaggggtgcttgtgtcatattccgttatgagatatggcagctttgcaaggaaaaatatggcatgctacatgggtatctatatactgacatggtttatcggtacggtagtgttattcattgcaaaatactcaggctggggcaatatcaaaaagcttggtccggctcagtattttaaggcactgtatggctcaaccctgtcagagatatgggggtatttttttgcaattgtgctcatgctgacagtgattgtttcaatttttccgcttaccgtgataaaaagcaggaaaatatatgcacggtatgtgttgggaaatacgcttttttggacgataatactcataccgcttaggtttatagacaagaaatttgtcaatcacaaggtgatgtggcaggccggctgtatgatggcctttgctgtgcttttgcttgtgctggagcttttcgttgtatacagactggtgaaatacaggtattgcgatgaacatgcagacaggaaagtgcgcattcacagacgcagggttcgaaggaaaaccataaaagctgtaatagtcattgtgccggtcgttgtcattgcaattattgttgtttacacatatttcatgtcgccttcaaacgagccagctgagtatgaaaaggtcgcaagctgtatcacaaatgatgacaggcttgggcctatggtttatgacagtcaggtgtatattccgataaccatagagcttgactatgcagggactggcagtccgcttggctatattgtatacaaggatcaggactatagcagcaggtactatgaggttgcagcatcaaacctcttatatatgaataagaacggtgacgatacatatttacagatggcgggcaacgcatcaaattcatacaagaagctgtctgtagttgaaaaaagcaattcatggaaggactgcagtgtttttcttatgtgggatgaggagtggcagtcagagtcgcgctacagcaaggatgtcacaggctatacggagtgcgatgaggatttcataaaaagtcttgaggatacctttggtgcagtgaaaataaatccggcagacttcaaggactatgatgcctattttacaatagagggctacaaatccatgaaggatgccatagaaagtgacagtcatgtgggcacctgggtgggctgcatactggcaaaagacgataaattttactatggcagctacgataatgaaatcacaggcggacagcttcagatgctgcgccatgtgcttggcggtaattgatatagcatttaatttttgccgaaagaaaattaaagtaaaaagaaataaaaaaaggatttttaaaaatcacgtcgaataataactagtgtagagcataattagtggaatgtaacgctatttgttacatgtgtgtgtgaatagcagcagaacataacgactgtgacagcgaggaggcagataaatgactattcgcgagcagatagaaaaacgtgagcaggaaatacttagtccgttcgcatgcctgagcaccaactcaagaggcagggactatgatgagccgcagtgcgatatcaggcctgtttttcagcgggacagggacaggatactgcatagcaaggcattcaggcgtctgaaaaataagacacaggtgtttcttacaccaaagggtgaccattaccgcacacgtatgtcgcatacacttgaggtgtcgcagaatgccaggacaatagccaaggcactgaggctgaatgaggatctggtggaggctatagcgctgggacacgatctggggcatacaccgtttggacatgcgggtgagcgtatcctcaatgagatatatgagggtggctttaagcataatgagcagagtgtgcgcatagtggagaagctcgaaaaggacggggcaggactcaatctgacctgggaggtcagagatggtatgctaaatcaccagacttcgctcatgccacacaccttagagggcaaaatagtcaggctttcagacaagatagcctacataaattcagactttgatgatgcaatccgcgcacagcttctgtgtgaggatgatataccgcttgagataagaaacacgcttggaaacagcaccaaggccaggctcaatcatatggtgcacaatatcatcacaaacagcatgggaaaggacgatatatgcatgtcaaaagagtccgcgcaggcaatgcaggatttgcgtaaattcatgttcgcaaacctctataacaatccagtcgcaaaaagcgaggagaaaaaggccaaggcgatgctcaagcagctttacttctattatatggagcatatagaggagctgccgcagaaatacctcgccatgctaggtcagggtgatgacaaggggcgcatcatatgcgactatatatcaggcatgacagaccagtatgccaccacgaaattccacgagtatttcgtaccggtagcctgggaaatcgacggatattgataattcgtacaaactcttagcagcgtagcgttagccggttgtaagagctaagtgccgcactgcagacgcgctcgccgggcgacacaaatgacaacaaagatgaacagtaaggggatgataaaatgccgtactactctgacgagcttgtagaggaggtacgttcgcgaaatgacatagtcgatgtcataggaagctacgtgcaccttcagaaaaagggaagtacctattttggattatgcccattccataacgaaaagacaggatccttttccgtctcaccgaataagcagatgtactattgcttcggctgtggagccggaggcaatgtatttacatttctcatgcagtatgagaacttcacctttccagaggccatgcaggagcttgcagaccgtgtgggaattgagcttcccaagcaggagatgacctcagcacaaaggagggaggcagacaggcgcacacagctgcttgagataaataaagaggctgcaaagtatttttatatgctgcttcgtggaccgagaggacaaagggcgcatgagtatttcaaaaagagagagctgtctgatgagacaatgcagaagttcgggcttggttactcggaccagtacagtgatgatctgtacaagtatctgcgcagcaagggctatgatgatgagatacttaaggagacaggtcttgtgacgatagatgaggtcagaggcgggcacgataagttctggaatcgtgcgatgtttccgattatggatgtgcacaaccgcgtcataggctttggaggccgggtgatgggtgacggagagccaaagtatttaaactctccggagacaaagatatttgataagagccgtaatctttacggacttaatatagcaaggagcacgaggaaaaaccagctccttttgtgtgagggctacatggatgtcatagcactgcatcaggcgggctttgacaatgcggtggcgtcgcttggcacggcgctcacgagcggacatgcctcactattaaagagatacacaaatgaggtgtatctgacatatgacagtgatggcgccggggtaaaggcagcgctgcgtgcgattccgatactcaaggaggtaggcatcacaacaaaggtcattaacatgcggccgtacaaggatccggatgagtttatcaaggcgctcggcgcacaggagtatgaggagcgtatcaaaaaggctgaaaacagctttatgtttcagatacggatcatgcaggcaggctatgatatggacgatcccgagtcaaaaaccgcattttataatgaaatcgcaaagaagctgcttggttttaccgaggagcttgagcggacaaactatacgcaggcagtgtccagagagtacagcataccatacgacgacttaagaaagctcgtaaacagtatggcaatgaagggcggtatcgtaaagccccagacaaagcttaaaagtggaatcaatgagaaaaataaaaaggaggatggaatgaagcagtcgcagaagcttctcctcacatggctcatagaggataattcactttttgacaggataaaggggcgtatcagtgcagatgactttaccgaagagctgtaccacaaggtggctgaggaggttttttcacagtacgagaccacgcatacagtaaatccggccaggatagtaagcatgtttaccgatgaggacgaacagcgcgaggtggcagggcttttcaatgccacaatccatcaggtggagggcaaaaatgacaaggcaaccgcactcagggagactgttatccgtatcaagcaaaatagtatagactaccgctcaaagcatctggcacctacagatatggagggcatgatgaggattattgaggataagcgtgcactcgaagaattgcaaaaaataccagaataaagaggaaaataaaatggcaaagaaaaaggaacaaaaagacatggcacaggagcaggagctgagactgaaattccagcagaagcttattgagattcttgagcttggaaaaaagaaaaagaatatgctcgaataccaggaaattgcagattttttcaaggacttaaatctggatccggagaagtttgagatggtaatagattatctcgagcaaaacggcatagacgtgcttaaaatcagcaatgatgatgacgtggatgatgatatcatactcgatgaagaggatgaggtagaggttgaaaagattgatctctcggtaccggagggagtcagcgtcgaggatcctgtccgtatgtatcttaaggaaatcggtaaggtacctcttctctcagcagatgaggagattgagctcgcccagaatatggaggacggagcggtagcaatcgagaagatcaatgtactaaagggccgccttgatggtgcatcggaagaggaaaaggctgagataaaggaagagataaagacactgcagagggatgtggacaagggagcagatgccaaaaagcgtcttgcagaagcaaacctgcgtcttgttgtcagcatcgcaaagagatatgtgggaagaggaatgcttttccttgacctgattcaagagggaaacttaggtcttatcaaggcagttgagaagttcgactacaagaagggctacaaattctctacatatgccacatggtggattcgccaggctatcacaagagccatagccgatcaggccagaacaatccgtattcctgtgcatatggttgagacgatcaacaagctcatccgtgtgtcaagacagctccttcaggagcttggcagagagccttcaccggaggaaattgccaaggagatgagcatgccggtagatcgtgtgcgtgagatactcaagatatcgcaggagcctgtttcgcttgagactccaatcggtgaggaggaggattcacatcttggtgatttcatcaaggatgataatgtaccggttcctgcagatgcggcagcattcacacttcttaaggagcagcttgaggaggtgcttggaactcttacagagagagagcagaaggtactcacactccgctttggcttagaggatggcagagccagaacccttgaagaggtaggtaaggagttcaacgtcactcgtgagcgtatccgccagattgaggcaaaggcactaagaaagcttcgtcatcctagcagaagtagaaagcttaaggactacttagagtaagatgattaggctatccagaagaatgaaggcagtggcatcaatggtcacggccggctacacgctgtgtgatgtgggaaccgaccatggctatgtgcctattgccctggtgcagggtaatataataccgaaggcaattgctgttgatataaataagggaccgcttgagcgcgccaatgagcatataagggcaaacggtctgacagagcagattacaacaagactttccaatgggcttgaagcgatacacgacggtgaggttgactctattgtcatagcaggaatgggaggagagcttgttattcacattttaaccgcaggggagacagtgtgcaggtcggcaaaggagctgattctgcagccacagtcggaagtgagcaaagtccgtgaatatgtaaggaacacaggctataagatagttgatgaggatatgattttggaggacggaaaatactatccgatgttcagatgtgtgccgtgtgcggacaattcagcatgggacaatatggacgagacgacggttactgtatgcgatttgtacggacctgtacttatcaaaaacggtaatccggtgcttcggaagtttcttgtcagggaacaccacaagctggctgccatcatgcagcagctaaggacacaggagatgagtgattccatcatggacagaatcgagcagataaacgagatgatggcatacaatgaggcagcatattcgactatgggggcaataagaaatgcaggaatatagtgtgaaggtgaccttgccggacggacaggtcatggcagtgacagcatcagaaagtgatactttagaagccgtagcagacagattcaaggattattatgaggatgacataatccttggaattgtaaacggcaggcttcgtgaactgaataagaaaataaaaagtgactgtgagcttagcttcgtgacgacagctgacagggatggcaggcgtacatacagaagaagtgttgtgctgcttttgcagagggctatatacgatgtatatggcagcatgacacagcttcatgtgatgcattcgctcggagaaggctattattgtcagcttgagaaaagcgtgacagagcatgatatcgacaggatagtatgcagcatgtactcatttgtggaaaaagacctcccaattaccaagcacagtgcaaaaacacagtatgcggagcagcttttcaaggaaaaagggcagcatgataaggagaggttattgcactacaggagaagctccagagtcaatctctatgagctggatggtgtggtggattatttctacggatttatggcaccctcgacaggcatgctcaaatactttgatatagtgccgtatgagagtggcttcgtgcttctttttccgggtgccaacagcaggagcgttgagccgcttgtgacatcaaataagctgtttcatacgctggatgattccagggaatggagcaagatgcttggaataggcacgataggctcactaaatgatgcgattgcagcaggcaggggacaggaaatcatgctgctccaggaggcactgatggagcagaagataggaaatcttgcagcgcagatcgcttcggatgacaaaaagaaatttgtcatgatagcaggtccttcatcatcaggcaagacatcgtttgccaacagactgtcaatccagcttatcgcaaagggcagaaagccacatccgttaagtctggatgactactatgtggacagggagttttgcccgaagaatccggacggaagctttgattttgagtgccttgaatctattgatataaagctgttcaatgaggatatgaacaggcttcttaaaggagaggctgttgatatgccttccttcaatttcaagacaggaaagagagagtaccgcggaagaaagctggtgcttggccctgatgatatacttgttattgagggtattcacggcctaaatgacaggctttcacagcttatcccgtctgagcacaagttcaaaatctatatctcagcgcttacacagctcaatattgatgagcacaatcctctttccaccacagatgaaagacttatacgccggattgtgcgtgatgcgcgtacacgaggtaccaatgccatggagaccatcgctatgtggccgtctgtcagaaagggtgaaagggagaatatatttcctttccaggaacaggcggatgtgatgttcaactctgcacttgtgtatgagcttgcggtactcaaggtgtatgcggagccgttgctttttggcatagaaagagactgcccggagtatctcgaggcaaagaggctgcttaagctcttagactactttcttccgatgccggctgacggcataccaaacaattcactgcttcgtgagtttgtaggaggaagctgctttaacgtttaaaactaaaaaatcccgctcgcagtatttatggtctgcaaaaggcagactgcatcatatacaacagcaataatagttaccgggaaataacaaaatgcaactgagatatctcagttgcatttttaatggtgcaccttgcggcgcacgttactaataagttattttacgaaacgccaataggctttagattattaaaatacgcaggacgataagccgggttatgtcgttgagtgatcatctatctaggacgcctgttgccagacgcctcaagcgacctacctaaagctggcgggccacgtcaaagctttgtttcggtcttgcttcggatggggtttacatgtgccctccctgttaccagtgaggcggtagtctcttacactgccattccacccttaccacaaaagtggcggtatatttctgttgcactgtccttagagtttcctccaccggccgttaaccggcatcctgccctatgaagcccggactttcctcacctgcggtctttcgacacctgcagccgcgatcacctgtcctgcatatttatttaatataccaagcatttttccaaaaatcaagcccttttaccaactttaataaacgaaatataaaatgtttcttaaaagacgataggtctattgacggtttttatcttcaatattatcttaataatgtaaagagcgatttaaaacctcaaatgcatagcgtggacactgtatgaggtaagaatttggctataatgaaaatatagggtgaggcggtaatatgagagaaaaatttatcagatttatgaatggaagaaacgggatggacgagcttgcaagggctgagtcatgggtagtaatgatattacttgtggtttcaatatttacaaggtcggcgatacttgatatactggctataggactgatgatacatatgtattttcgtgtattttcaaggaatgtaagcaagcgctatgcagagaatcagaagtttttaaatgccaggtatgagtggaccgtaaaggctgagcgcaggaaaaagcgctttgcacagaggaagcagtacaagttcttcaagtgccctatgtgcaagcaggaggtcagggtgccaagaggacatggcaagatctgtataacctgtccgaagtgccgggagcagttcgtgagacgcagctagtacatcgaataataagtaaccagccatatgacttgcctgatttcccatctgcggcgttgtagtcaatcgacgtagccaccgctacgcctcattcctccgccttgcagatgaaaattcattctgcgtcatatagccagaaacttatttttcgatgtactggtacgtcaatatatatacctgtacataagagcatggagaagagaaatgtttggatatataactgtcaataaggacaccttgtccgaggaaaataaaaaaatatatcaaagctattattgcgggctgtgccagacaatgaagtcgcagtatggcaggcgtgcacagatggcactaaactatgacatgacttttctcatagtgcttctgacaggcttgtatgagccggatagtgtgacgcgggaaggatttgtatgcagcgtgcaccctacgaagaagcgtacacttcgcaccaatgagattacagagtatgctgcagctatgaacatactgctggcatactacaatctgatagatgactggaaggacgataaaagcctgacgaagaagacatacgcagagatgctgaaaaaggactttgagaaggccaaaaaaggctatccggtacaggctaaggcgatagaggactacattgcaaggcttacagagtgcgagaagagcaatgataccaatattgatgcagttgcggggctgacaggagagatgctcggcatactttttgcgtggaagcaggatgagtggcagaaggatttgaaggaatttggctgctacatgggcaaatttatttatataatggatgcgtatgaggacataggggatgatgtgaaaaagaaatcatataatccacttatacagctcatgcattgctgcaataatgaccaggaaaaatttgacaaatcctgtcggcttatgatgacatctatgctttcagaggcagcaaaaatatttgagaggttgccaattctcttacatgcggatataatcagaaatgttctatactccggtgtgtggagcaagtatgagtatattcagatgaagaaaaggaagaaacataaatgatagatccatatcaggtgctcggtgtcagccgcagtgcaagtgacgatgaaataaaaaaggcctacaggagcttaagcagaaaatatcatcctgatgccaatatcaacaatcctaacaaggatcaggctgaggagaagtttaagcaggtgcagcaggcatatgaccagataatgaaggaaaagcagtccggtgctgccggagccggtggatatggtgcgggaagcagcagctcatacggcggcagctcctatggtggagcatatggtagtggaccgggagcaggtgatccatttggagcaggtggaccgtttggtggtttctatggccgctatacctacaataatgcaggcagcagtgcacaggatgacaatccaaaggtgcgtgcagcaggcaatttcatcagcaacggctactacaatgaggcactgaaggtgcttgaggaggtaccttttgctgagagacgcggaaggtggtactactacagtgctgtcgcaaaccaaaagctcggaaacacagcgacagccatagaacacatacagcgagctgtgtcgcttgagccaaacaacatgcagtaccgccagtttatgcagataattgaaaatggtggctcgtggtattcggatatgggagacatatacggacgccctagtggcaggggcagcgagtgctgcagtctgctagccacattcctttgctggcagatgttctgctgctagatgtcaagcttttctgatgttacagatggaaattcatgcaagttattgtgctggttatttgcagaacgatggactggtatattaatctgtgcaattattctgaatagttacctgaaaaataaaagatgcggtcatacgaccgcattttttatttatggacatgagtaactattcagatccacacatatatgagcaaaatcagctgcgcagcaatggctgtattattccatagaatccggaataccatcatgatccaaatctgccatgtctgctccgtgtgcaccgatatccacagtgtttaaggtgcgtcttttaagtcttgcggcttcagactgctttagcagatagttctttatctcgcgtgagtgctttacgtgaacgagcttaagctcagggtttgtaacgtcgcctgtgtagcagactatggtgccgagcttaaaaatgcgctccatcagtgatgtggtaagctttacatcagctaccttatacatgtagcagtcatcctctgtggtgcttaagagtccggactctacagtgataaaggacggtgtgacggtatattttgtgaaagtccacggcagaccgagaaacagcagtctctttctctctttaaagattacagcatcgtcatcatcgattgcgccggcggtggtgtttttgatttgtgattcatttacagacatattattctcctttttgatgttgaaattgtcgtaattgtatgaaaacttcactacaattactaagcattcagaacagttgcattctgacatatattctacaacaaaaaagtgtaaaagccaacttgaatattgtgctaagttattatatgatagaaaaaatgtaaaaaaaatagttacgcgaaaaagaatggaggcaaattatgcgtcacttaatgagtccgttggatttttctgtagaagagttggacaagcttctggatcttgcaaatgatatagaggctcatccagagaaatatgcacacaagtgcgatggaaagaagcttgcaacctgtttttatgagccaagcacgagaaccaggcttagctttgaggctgccatgcttaatttgggaggctcggtgttaggtttccacagtgctgattcgtcatctgcatcaaagggcgagagcgtttcagatactatcagggttatttcctgctatgcggatatctgtgccatgcgtcatcctaaggagggtgcaccgcttgtggcttcagaaaaatcgcgtatccctgtaatcaatgcaggcgatggaggtcatcagcatcctacccagacacttgctgatctccttacaatccgttccatcaagggcagattgaataatatcacaatcggcttttgcggagatttaaagtttggacgtacagtgcattcactgatcaatgcactcatcagatatgacaatgtgaggattgtgcttatctcgcctgaggagcttaaggtgcctgactatgtgcgcgatgatgtgcttcgtgccaacaatatcgagttcaaggaggtagaaaagctcgaggatgccatgggagagcttgatgtgctctacatgacacgtgtccagaaggagcgtttcttcaatgaggaggactatgtgcgtctgaaggatttctacattctgacaaaggagaagatggagcttgcaaaggatgatatgattgtacttcatccgctcccacgtgtgaatgagatttctgttgatgtggatgatgacccgagagcatgctatttcaggcaggcacagtatgcggtttacgtgcgtatggcgcttattctgacattgcttggattggctgaggactaaaggaggataatatgctgaatataagtggaatacatgagggctttgtgctcgatcatatcaaggcaggtatgagtcttcagatttacagggatttaaagcttgacaagctcgactgcacagttgcaatcataaagaatgcaaagagcagcaagatgggcaagaaggatattatcaaggtagagtgtccgatagagtcattagacctcgatatccttggatttatcgaccacaatatcactgtaaacgtgataaagggtgacaagattgtggacaagatggagcttaagctgcctcatcaggtgaaaaatgtcatcaagtgtaaaaacccaagatgcatcacttcaattgagcaggagcttgaccagattttcgtgctttccgatgagaaaaacgaaatctaccgctgcaagtactgcgaggagaaatacgaaggagttaaatagtataagttatgtatgccaacgtgattgtggatatatcccacgaaaaactggataagacatttcagtacagcatcccggatgagattttatgcgacatccgtccgggtgtgtgcgtggatattccatttggcagccgcactatcacaggctatgtgattgaggtcacggataagcctgagtacgacccggcaaggacaaagcctcttatcgggataaaggcagactctgtggctgtggaggcaaagctcatcgcacttgcggcatggatacggcgcaattacggctctaccatgaatcaggcgcttaagactgttatacctgtaaagaagcaggctaaggagcaggtgagccgcagtattgcactgaaaatagacaaggtaaaggcaagggcgcagcttgcgctttgcgaggcaaaaaaacaaaaggcaaaggccaggctgtttcgtgcgctgatcgatgctgatgatggggcgcgccttgagtattcctttgtgacaggcaagctgtcggtgtcggctgccactataagagcgcttgagcagagtggttttatcgaggtcatcacacagagcggctacagaaatcctgtggagcatatgagtgttgacacctatgataaggtgctgaatgccgcgcagcagagtgtggttgatgcgatagaaggcgacattgccgctggccttagaaatacttatctgattaagggcgttaccggaagtggcaagacagaggtgtacatggagcttatagcacactgtatacagtccgggcgtcaggcgattgtgctgattcccgagattgccctcacttatcagaccgtgatgcgtttttttgcaagatttgggaacagggtttcgataatcaattcaagactttcaaatggtgagcgttatgaccagtttgagagagctaagaatggtgatattgacatcatgattggcccgcggtcggcgctgttcacacctttttcaaatttaggacttatcataatagatgaagagcacgagaattcatacaagagcgagtcggtgccgcgctatcatgccagggaggtggcaatagagtacgcgcgcatgtccgatgctattgtggtacttggctctgcaacaccgtcggtggatagctattacaaggcgaagacaggcgtttacaggcttttggagctggataagcgcgtggacgacagacctcttccaaagtgtgaggttgtcgatttgaggcaggagcttcgtgagggaaaccgctcgattctttccaccaggcttcaggagcttatggaggagaggcttctaaatggccagcagaccatgctttttttaaatagaaggggcaaatcggcatttatgtcgtgcagagcgtgcggttttgtggtaaaatgtcctcattgcgatgtatcactcagtgagcatagcggcggagtgatggtctgtcactactgcggctacagacagccggtgcctaaggtgtgtccgagctgtggctcgaagtacattagcggctttaaggccggcacacagaagatagaagcgatggtggcaaagcgttttccgcaggcgcgtatactgcgcatggattatgacaccacgagggcgaaggatgcgtatgagaagattctgcaggcattttccaatcatgaggccgatatacttatcggtacgcagatgattgtaaaggggcatgatttttcaaatgtcacgctggttggtgtgctggcggcggatatgtcactgcatgtgaatgattttcatgcggcggagcgcacctttgctctgctgacccaggcggcagggcgtgccggcagaggaaagctgcccggcaatgtggttatccagacctacgaccctgaccactatgccatccggactgccaaagagcaggattatgaggctttttacgataaggagatagagtacaggaggcttatgcattatccgcctgtatggaatatgcttttagtccatgtcacatcacctgatgagagtgagtgcggcagcatggcacagcaagtgtacgatatagcgtcgcagatgatatcgcatacagatgaaaatcaaagccaggatgataggcatctgattcagctcatcggtcctgcggatgcgaccatcgccaaggtaaatgacatataccgcaaggtgatttacatgaagacatctgactatgcggcgctcatttccataaaggatggaatagagcaggctgtgaaagctgatacggcaatgaaaaatgctaatatctcatttgatttcaatccgatgagtggattttgatagatatagaaggaggcaattatggcacttagaactattagagtggagggagaccctgtacttggcaaggtctgcagagaggttacggaggtgactccaaagatagtaacacttattgatgatatgcttgagactatgtatgaggccaatggtgtaggacttgccgcaccacaggttggcatattaaagaggatcgttgttatcgatgtgggcgagggtccgatcgtgatgattaatcctgaaattatcgagtctgacggagagcagaccggcgatgagggctgtctttcgataccgggaaaggccggacaggtaacacgcccgaatcatgtaaaggcccgcttcatgggcgaggatatgaatgagtatgagatagagggagaagagcttttggccagatgtatctgccacgagcttgaccatctcgacggacatctctatgtggagaaggttgagggcgcacttcacgatgtgacatatgaggatacacaggagtaatcattaggatgacatttgttatctgagcttggaaaatatctgggaggcagtaagatgagagtaattttcatgggaacaccggacttttcggtgggaacacttgaggcaattatagaggcagggcacgaggtggcactggttgtcacacagcccgacaagccaaagggccgcggcaagacaatgcagtatacaccggtcaaggagtgtgcgctttcgcacggtattgaggtattccagccggttaaaataagagagactgctaatatagagtatctcagaaagtttaatgcagatataataattgtggttgcttttggacagattctgtcaaagagtattcttgatatgcctcgatacggctgtatcaatgtgcatgcttcacttctgccaaagtacagaggtgcggctcctatccagtgggctgtgattaacggtgacgagtttacaggtgtcactaccatgaggatggatgagggcgtcgataccggcgatatgattgcaaagagtacagtcagactcgcacctgatgagaccggcggcagcctgtttgataagctctcagcagagggagcaaagctgtgtgtggagaccatgaagatgatagaggatggcactgcagagtatactcctcaaaacagcgaggaggccacacatacatcaatgatcagtaaggagcttggctttatcgactggacaaagccggctgttgagattgagaggcttataagggggcttaatccatggccgagcgcatacacccacctgaatggtaagacatttaaggtgtggagtgcaaaggtgattgacggcagcgatgattatgagccgggctgtatttatcatatcggaaaaaatgatatgtatgtacagacaggaaaaggagcattatctttagtagaggtacagctccagggcaagaagcgcatggatacaggttcatttttgagaggctgtcatgtggaagagggctcgttcttcacattatagttattcattataagtaactattgacaaactactacacgcattataataagcagcaaggagagatgatacatgggatattattactgggatccgacatatatactcgttgtgataggtgcagtgatatgtatgattgcatcggcaagagttaaaggtacatttaataaatactcgcagctaagaagcatgtcaggcatgaatggcgcacaggtggctcaaagagtgcttcaggcggcaggcatatatgatgtgcaggtgcgtcatgtgtccggcagtctgacggaccactatgatccgcgcaccaaaacagtgaatttatctgatcctgtgtacaatgccacatcggtcgcagcacttggcgtagcagcccatgagtgtggacacgctatacagcatgcaaaaagctatgcacctctttcaatcaggagtgcacttgtgcctatagctaattttggctcaatgcttgcatggccggtcatacttatcggcttattatttaacacacgctcgtcagggcttattattgatataggcatattgctgttttcggcagcagtgcttttccagctcgtgacattgccggtagagtttgatgcttcaagacgtgcgcttgtcatgcttcgtacacagggtatacttgcagatgacgagcttaagtacacaagaagggtgctcaagtcagcggcacttacctatgtagccagtgcggcggctgctattttacagctccttcgtataatacttatcacaaacggacgcagacgggacgactgatactgttttagcagcaagtaggttaaactatatgacatcgaataagaatataaataatcataataataaaaatagccaaataaacaaaaataatataccgggcagaccggcaagatcaaacgtggcagcgcataatgagcactctgtagatacgcgtgagcttgcccttgagatgcttattgagattaatgagcgtggagccttttcgcatatcgtgcttcgcagtgtgcttgacaagtatcagtatctgtcaaagcaggacagagcctttatgacgaggcttgttgacggcactatcgagtatatgctgcagctcgactacatcatagactctttttcaaagacaaaggtaaggaagatgaagccctttatcagaaaccttcttcgcatgagcgtctaccagataaagtacatggacgcggtgccggattcagctgtatgcaatgaggcggtgaagcttgcaaagaggcataagtttgcacagctttcgggctttgtaaacggtgtactcagaaatattgcaagaaatatagattcagtacagtttgataccttaagcatccgatactctatgccacagtggatagtggacagatttgtatcagcatacggagagaagaaggcagaggagattttcaaggcctttcacagtaagagcacaataagcatcaggacaaacctgaccaggtgtactccggatgagcttcgcgcgatgcttgaggcagagggtgtgacggtcacagcggttgatgaacttgattatgcgtttgttatatctggatttgattatttgaatggcttgcagagcttcagagacggacttttctatgtgcaggatatcagctccatgcttgtcgcacagacggctgctccaaagaagggcgactatgtgatagatgtatgcgcagcaccgggtggcaagagcacccatatagctgagcttttgcagggaagcggccatgtgctcgcgcgtgacctgaccgataccaaggtcggtatgattgaggaaaatatagaaaggcatggtcttaaaaatatgtcggcagaggtgtgggatgccaccgtacctgatgctgattcggcaggaaaagcagatatactgatttgtgatctgccgtgctcagggcttggagtgctcggaagaaagaaggacatccgctacaagatgacacctgagtctgtagatgagcttgccgctcttcaaagacagatacttgataccgtgcatacatacgtgaagccaaacggagtgctcatgtacagtacatgtacgatagatgaggctgagaacgaggacaatgtgaggtggtttattgaaaagcatccggagtttgagctggataagagctttgctgagggcaccggaatgaaacagatactgcccggtgagcatggaagtgacggattctttattgcaagatttataaaaagcaaattatgatattaaagtaaatcatgaattaataaaaacaaattgattcgaattagtagaattataaaacaatagttaaatgcagatttaataaaaataatatggaacagataaaagaacaactaactgacatcaaatcaatgaatatggatgagctcacagagtttatcatatcgctcggagaaaagaaattccgtgcgaagcagatatatgagtggattcatgtgaagcatgtggaaagctttgatgagatgaccaatatttcaaaaaagttcatacaggtattaaaggacaatgcaatactcatctcgctaaaaaaagaggaggtgcaggtgtcaaagctcgatggcacgagaaaatatctctttgcactggacgatggcaacgtcatagagagtgtgcttatgaagtacaagcatggaaactctgtatgcatatcttcgcaggttggctgcaggatggggtgcagattctgtgcatccactcttgacggtctcgtcagagggcttaggccgtccgagatgattgaccagatttatcagataggcaaggacataggagagcgcatctcaaatgtagttgtcatgggcacaggtgagccgcttgacaattacgacaatctgctgcgctttatagagcttcttactgatgaaaacggtatcaatatcagccagcgcaatctgacagtttccacatgtggtctcgtaccgcgcatgaaacagcttgcagatgaaaagctttctatcacgctggcgctttcactgcatgcatccaaccaggaaaagagaaaagctctcatgccggttgcaaacagctatgatatacatgatgtggtcgatgcatgtaaatattattttgcacagaccggccgcagagtcacctttgagtatagcctggtaggcggagtgaacgatacagccgaggatgcagcagagctttcggcactcgtacatggcatgaactgccatataaatctgattccggtaaacccgataaaggagcgcgattacgtgcagtccaacaagggtgttatagaggcttttaaaaataggcttgaaaaaaacggaattaatgttactattagaagggaaatgggcagagatatagacggtgcctgtggacagcttcgcaagaagcatatagataaggagagaggaataaactagatgaagacgttttccattacggatgcaggtgctattcgtgagatgaatcaggatttttatttctcgtctgacactgcagtaggaaatcttccgaatcttttcatcgtagcagatggaatgggaggacacaaagccggtgactatgcttccagatacactatagagcgtgtggttgcatcggtatcgagaaatgccggggatgaaccggtatccatcatcaaagaggctatcaacaaggcaaatgagcttttggtggctgagtctcgtgaggatgaagctaagcgtggaatgggtaccaccttagtcataggaactattataggaaacaagctttttgtggccaatataggtgacagcaggctttatattgtaggtggcacagagcagatcagacagattaccagggatcattcactggttgatgagatggtcaggatgggtgagataaatgccgacgaggcgagagttcatccggacaagaatatcatcacgagagccgtcggggcagcagatcatgtggaggcagatttctttgaggtcgagctatgtgaggacgataggattcttctgtgtacagacggacttaccaatatggtgagagatgaagaaatatgcgatactattaggcaaaatgataatatcgagacagcagcgtcacagcttgtcgccatggccaatgcaaacggtggccgcgataatatcacagtaatgattattaaaccattttaagacgaggtaataacagatgttagagataggaagttttttatcggatcgatatgagatcctaagcaaggttggcgcaggcggcatgtccgatgtatacaaggcaaaagaccatatactgagccgttttgtagctataaaggttttaaagcaggagttttcggaggatagttcatttgtgaccaagttccgtgctgaggcacagtcagcagcaggacttgagcatccgaatatcgtaaatatctatgatgtaggcagcgagaatggtctgtactacattgtcatggagtatgtcgagggtatcacacttaagacttatatcgagaaaaagggccagctgtcattcaaggagtctgcaagtattgcaatccaggtggcaaggggcatagaggccgctcacaataaaaatatcattcaccgtgatatcaagccgcagaatatcattatttctacagatggcaaggtaaaggtgacagactttggaattgcaaaggctacatcttcaaatacaataagctcagatgtgatgggctcagtacactatgcatctccggagcaggcaagaaacggcttcgtcgatggcagaagtgatatttactcactgggaatcgtaatgtttgagatggttacaggccgtgtgccgtttgacggtgataccacagtggcagttgcactgcagcacctacaggaggagattgcaaggccaagcatctacgcaccggatctgccaatcagctttgagaaaatcatcttaaagtgtacacaaaagacaccggaccgcagataccagactattgaggagcttctcacagacataaggcgctctcttgcgcatcctgatgaggatttcgttacaatagcaccactcgttgacggtggcaagaccaaggttataagcccggatgagcttgacaagataaaagagggcagaggtgtcgcagaggacttaaacgatgatgataccgatgcagataatgatgatgagtatgctgacggtgaagacgatgatgatgaatatgatgagtcactcttagacgacgatgatgacgaagacgatgatgatgacggcaagcttttaaatccaaagatggataaagcaatcacaatcatgggtatagtaacagccgtaatcattgtaatagttatcatatatcttgcactttcagtggcaggagtgtttaagtttggcggcaaaaagaactcagagtcacagcagacagagtcacagacacagaccgagtctgaatcagagtcagagacacagactgagacagagggccagatgattgacatcagaggcatgtcagtggatgatgctcagaaggcagtagaccgcttaaagcttgacctcacagtatttgcatttgagacaaagcagtcagatgaaaaggacggcacaatccttgagcaggatgtcaagggcggagatacagtaaagcgtggttcacagattaatgtagttatcgcaggaaaaggtgatagtacatcagagatggtcaaggtaccaagtgtaatcggaaagaccaagagctcggcaaagagcacactcgagtcagcaggctttagtgtcaccttcgagtatggagattacaataacagtgtagcagcagatgtggtaacagcacagtcgccatcagcaaagaaacaggccgcaaagggcagcacagtaacagtcaccctttcaccgggccagaagccaatcaccgtgccaaacgtagtaggcgcctcacagtcacaggcagaaagcgccctcgcaggagcaggcctcaagtacacctacgccgactcccagtacagcgacaccgtaccagccggtagcgtaatcagccagaccaaatccggcgaaaccgtagccgcaggcaccacaatcacacttacactcagtaagggaaagcaggagatatcgactaacgtaagtaaaggaattagttatagtggagagggaactgtagtaaaagcagagtataagcttgtaggtaaaagtggaactgtatacgataagggttcatatgaaaatacgtcatcatttacagtttccggaacaatgaaagaagctacaggaagtattgtggttacttggacagttcagacaggggaaacagatgaagcaggaaatcctgcaactgtcacacttgatccagtaacgtatagcgtgccataagcataagagaagttaaataattattataaaccggaatagcaaaaaataggtagatattgccatagcttggggcagcacgaggaaaacgagccgtagcgcagctacgtcaagttttccgtatcgccatcgtatttgtaaatacacacaatacacatatagcgcataaagcagcaacacaatacatgtccttattgtagccaccggatagcacccacaaggtgggtgctatccgcaccccactaccacaccaacccgcggacgaaaacctgaactcgcggagaggaactaaggaagcggggcagacatgtgttccgaggaaaaaatatgaattgccccggggtgccataaacctaccgaggaaaaaacagggcagagcaagccatagcctgtccgtaggagagcccggggctggcttcatattttttaagaggaatatatgcctgcccccgccacccacacaacctcaaagcgcggcatgcaccccgccgaaagcgtgactcctgcaaatacaaaagcacacaaggaaaaccatgacaggaaaaattattaaaggaattgccggcttctactacgtctacgtagaagaaatcaaagaagcaaaagaaactgccacaggcggcactctctacgagtgcaaagcaaaaggcaccttcagaaaacaaaagataaagccgctggttggcgatatagtcgacatagcagtcctcgatgatgaaaagcacataggcaatgtcgagcgtatactgccacggaaaaacgaacttatcaggccggctgtgtccaatatagacatggccctggttatttttgcatccgcaaagccggatcccaatttcaacctgcttgataggtttttgtgtatgatggagtaccagcatgtcccggttaccatatgcttcaacaaaaaggacttaatcacacctaaagagcagcaggagcttaaaagtatatacgagccggctggctatagagtgctttttaccagcacgaaaacaggtgagggcatagatgagataaagcacattttagagggaaggacgaccacggttgcaggtccctcgggagttggcaagtcatctatcataaactgtctgcaggatgatgtgcagatggagaccggacatataagtgagaaaatagagcgaggaaagcatacgaccagacattctgagattatcccgataaaggatggcacgtatatcatggatacacccggctttagctcgatggatgtgccgggctttgaaaaggaagatttgtggacatgttatccggagtttgtagaatatgagccatattgcaggtttcagggctgcagtcatataaatgagccggactgcggcgtgaaggaagctcttgcagatgggaaaatatcgcaggtgcggtatgataattataagcttttatatgaggagcttaaaaacagacaaaagtattaatttaaagcataatcaaacggaggaaaacatgaactgtttatcaccatcaattttatcagcggattattcaatactcggagagcagcttaagcagcttgatgaggcaggagcacagtatgtgcatatagatgttatggacggcagcttcgttccaagcatatcaataggactgcctgtcataaagacaatcagaaggtgcacagagcgtatgtttgatgtgcatctgatgatagatgagccggtcagatatatagatgattttgcgacagcaggagcagatatcatcacagtccatgcggaggcatgtaagcatcttgacaggacaatcgaggcaataaaggaaaagggcatactggcaggtgtagcattaaatccggctactccgctctcagccatagagtatgtgcttcccaaggtggacatggtgcttatcatgactgtaaatccgggctttggaggacaaaagcttattccgtacactgtagacaaggtgcgcgacttaaaggcacttcttgagaaaaccgcaaataaggctgatatcgaggtggacggtggtgttaatcttgagaacgtggagacactgcttgcggcaggagccaatatcattgttgcgggaagtgcggtgtttaacggaggtatagaagaaaatgtaaaaggttttctgaatatcatgatgtaacagatgcaggttaaaacaaaaatgcttccggggctgtagcaaatgtggatatgttatttataagaaggtggacaaaatgaagtatttgattgtatgtggtggaaaaacagataaggaattcggcttaaatgagataaagactgacggaatagatgccataattgcggctgacagcggaatggatttcctgtacgaaaacggtgtcacgcctgatataattgtaggtgatttcgattcagccacgacaaaggcattggagttttttgagagaaagggacagaccgagatacacaggctcaatcctataaaggatgatactgatacagagtatgccataagacttgccataagagagggtgcacgaagtatagtgatgcttggagcaacaggaagcagaatagaccatgtgctcggcaatatttcacttttgggaataggattggaaagtggaactgatatcagcattatcgacacaaacaaccgtataagaatggcggataagcccgtaaccattgaaaaatcagcacaatatggcaggtttgtttcgcttatagcagtgacagacgacaatgaggtgagccttagaggctttaagtattctgttacggattattcctttgacagatttacatcgcttggcatatccaatgaaataattgatgaccatgcagtgattgatatccataggggaaaatttatcattattgagtcaaaagattgactttttaggaatttgggactattatatttttaggattatttcggaaaatatgtatggtcatacagtaaagacaggcgagaaaggacactatgcattcttttaaatcagatgaatttaagataagagtattgacaaaggacgatgcggaggaatacaatgcactgcttcgttatgcttttcaggtaacagaggcagatcttgccgagaccggttggaaggatgatgaaatcaagcagtcgaagtttccggtgcttgagagggctgatgtgcttggctgcttcaatatcatagacaaaaaagaggagcttgtggctcagtttgctgtatatccgctcgatatgaatatatatggtgagcgctacgaggtaggctttgtcacaagtgtgtgcacgtatcctgagcacacaggccatggtatcatgaaaaagcttatgagaaagagtcttacgaggatgcgcgatagcaacaagtcgtttgcccttttgtatccatactccatacctctttacagaggacttggctgggagattatctcaaacaagatgacatatgtgataaaggacagacagattcctacaaagcttaaggagccgggctatgtgcgccgtgtgcagtgggatgacgagcagtttaagaagcttcatactcactttgccgcgaagactcacggctgtctgtacagaaacaatctggcttgggaggagtacttccgctgggatgaggacgatacgatggtcgccatctactataacgaggatgatgaaccgtgtggctatatggtgtatcttatcagctccgatgtcatgcacatcaaggagctcatctacttaaaccgtgaggcgcagcttggtctgtgggagtacattcatgcgcacgattccatgattgatgaggtcagaggcaacaactattacagcgagcccatcgcttttgagctcgatgacagtgatataaaggagacaataagaccatacgccatgggcagaatcatcgacgtggcgcagtttatattacagtataactgtgacccggatggcccgggcggctgctttagcttcgagatagaagatgagcttctgccgtggaacaatggcacatttgtcattgattttgagggaggtcattgtactctcaccgacaaaaagccacagcatcacctaagcatgtctattggcacgtttaccacactgcttttaggctacaagagtgctgagaagcttttgcagatgggcaaaatacaggctacgtatgatgctgttgcaaagcttgacgatattttatatcatgagataccatatgtatctgactacatataatgataaaaggtcaaaaggtaaaggaaaataatatgtcaaattatgtgattagctgctgttcaacagcagatcttaccagggagcatatgctcgagagaaatattaagtacgcatgctttcactatgagcttgacggtaaagagtatatggatgatttaggacagtccatgccactgcctgatttctacaaggcaatggaggcaggtgccatgacaaagacctcgcagatcaatcaggaggagtacatggagtacttcaggcagtttctggatgagggatatgatgtgcttcactgtacactaagctcaggtatatcaggtacagtcaactcggcaaggcttgcaaaggaggctcttaaggaggaataccctgacagaaagatatatgtgattgattcgctggcagcatcgtcaggctttggtcttttgatggataagctcgctgaccttagggatagcggcatggatattgatacactggctgattggaccatggagcacagacttgaggtgaatcactggttcttctcatcagaccttacattttttatcaggggaggtcgtatctcaaagaccgcgggattcgtgggaaatgtgcttaatatctgtcctttcatgaatgtgagcaatgagggaaagcttattgtgcgtgagaaaatccgtaccaaaaagaaggcaataaaggagatgcttgtgaagatgcaggcactctgcaaggatggtgccgattattcggataaggtctatatatcaaattctgcatgctatgaggatgctaaagccgtagctgatctgatagaggctgccttccctaagatgaagggaaaagtagagataaatgatatcggtacgactataggaagccacacaggtccgggaacagttgcattgtttttctggggtaataagagagaggattagccggatattttagcctaaatatctgattagaataatcaaaatcaataaagttgattatatttttataaaaaattaaattacatcaatcaaagtgattaaatataatcattccaataactgcgcttatgtgttacaattatatcagttcaaacgaaaagaggttttaagatgaaaggatatgaaaaatacgagcgcagttattttctgcctcctgaatgcacttatgactgggttaagaaggattatatagataaagcaccactgtggtgttcggttgatttacgtgatggcaaccaggctctgatcgagccgatgagtcttgaggagaagcttgacttctttaagatgcttgtagatataggttttaaggaaatcgaggtaggtttcccggcagcttctgagacagagttcaatttcacgagagctcttattgagagggatatgattcctgatgatgtcactatacatgtgctgacacaggccagagagcatatcatcaagaagacattcaaggcacttgagggagcaccgagagcagttgtacatctgtacaattccacatctgttgcacagcgtgagcaggtgtttaagaagtcaaaggaagagataaagcagcttgcagttgacggagctattttactgagagaccttgcagcagagactgacggtaatttccgtttccagtattcaccggagagcttttcgggcactgaggtggattatgcggttgatgtgtgcaacgctgtgcttgatgtatggcagccaaaggctgataataaggccatcatcaatatccctaccacagtagagaatgctatgccacatgtttttgccacacagatagagtatatcaacaagcacctcaagtacagagacggagtagtgctttgcttacatcctcataatgacagaggctgcggtgttgccacatcagagcttggtgtgcttgcaggagctgaggagatagagggtacgctgtttggaaacggtgagagaacaggaaatgtagatatcgtgacacttgccatgaatctttactcacacggagtggatccacagcttgatttttcaaatctgcctgagatcagggagaagtatgagacatttaccagaatgaaggtaggcgagagacagccatatgcgggagaccttgttttttctgctttttcaggctcacatcaggatgctatctcaaagggcatggcatggagagaggaaaagaagcttgataagtggacggttccatatctgcctatagatccaaaggatgtcggcaggacatacgaggctgatgttatccgtatcaacagccagtcaggaaagggcggagtggcatatatccttaagcagagcttcggtatcaatgtgccacagcagatgagagagcaggtcggatacatggtcaagcaggtatcggacgaggagcacaaggagctttcacctgagtgggtacacagtatctttacagacaattatgtggattttcatccatatttcactataccggagtgccactttaagcaggtaaacggcattttcgcagaggcagttattttacacaatgacagcaccagaaaggtagatgccaatggaaacggccgtctcgatgcagtcagcaatataattaagcagtattttgacatcagctttgagctcactgtatacgaggagcattcgctttcacacggatcttcatcaaaggctatggcgtatgtgggtatcacagttgacggcagtatgttctggggcgcaggtgtggatgaggatatcatcaaggcatcaatcggagcgcttgttgttgcggtaaaccattatcttgccaccaaggctgacagtcacgtgaaggatgagcgctatattgctatgctcaacttcatccaggccaactacaagacggtatcgcttgcagatatggctgcacagttcaacttgacagagccgtatatctccaagtacataaaggagaagtcaggcaagactttcggggagctggtcaccaatgccaagatgaagaaggcacgtacactgctgagaaacagcatcacaactgttgagaatatcgcaatcgaggcaggatatcagaacgtggagcattttaacagacagttcaagaagctgtatggaatgacaccgcttgagtacagaaattcaagcacaaaataagcggatacagcattttaatataaccggatcaatatgctaaatgacaattcattcagctgtattggtccggtttgctttttagtattgcattttttatgtgaaaatctgcattaaaattgtataaaaatgggaacaatgggctattgattgtattttatcaagtaatttgttgtttttacaacggattatatgtacaattcgggtataatataaataaaagataattattcagaactaccgataacaaagcagatattgagaatttgtgtttgggatgaatagttataatataaagcaactatttgaattatagtttaagaaagagaggaacgtacatgagcaataaaactagcgcagttgttaagacaaacccaagaaaggctgtcatgatcggatgtggattcgttggttcggcatcagtttttgcacttatgcagagcggtcttttttctgagatagttctcattgacgctgataaggacaaggctgagggagaggcgatggatataagccacggtattccttttgccagacctatgaagatatatgcaggtggttatgatgatgtggcagatgctgctatcattgttgtttctgctggtgcaggccaaaagccgggtgagacaagacttgatctggtaaataaaaatgttgcaatcttcaagagcatcattccggagattgcaaagagaaatttcggtggaatcttacttatcgttgcaaaccctgtagatattttaacacaggtggcacagaagctttcaggacttcctgaggagcgtgtcatcggttcaggtaccgtgcttgacagtgcaagacttaagtacgcgcttggagagcaccttgaggtggacagccgaagcgtacatgcatttatcgtaggtgagcatggagacagtgaggtggttgcatggtcatcagccaatgtttccggagtggagcttcacaagatgtgcgagatgagaggtcactacaagcataaggagaatacagaggaaatcgctgcaaacgtaaagaacagtgcttacgagataattaacagaaagcatgcgacatattatggtatcgctatgtcggtcagacgtatctgcgaggtaatcatgcgtgatgagaagtctattcttcctgtttcacacatgatgcacggacagtacggcatcgacggtgtggttctctcaatgcctgcaatcgttggagcaaacggagtggagagcgatatcccaatcgagttaaacggtgaggaagctttaaagctcaaggagtctgctgatgcacttaagagcatacttgacgggcttgagctgtaaatatcatgctcttaatattaattttgcaatattaaacttatataaaatactataaattcagtatggtttggggtataatgataactgtcgggttgcatatattatgtgctcggcggttatttgattttatggcagataactatttagaattactgggaaaaaggagtatatataatgagcgaaagaaaacaaatccatcaggagtttctgacaggcgaaagagccctgtttgcaagcaacgacctggatatatatgatacaatttttgatgacggagagtcacctcttaaggagagccatggcattagcctgacaggctgtttttttagatggaaatatccgctgtggtattgcagtgacatagaagtaaaggactgtacatggtttgacatggcgcgtgcgggtgtctggtatactgacaatatctctgtcactgattcaatagttgaggcacctaagaacttcaggcgctgcaataacctaaagcttaaaaatgtgacatttccaaatgcccaggagacactctggagttgtgatcatgtcaatatcgagaatgtctcggcaaagggagattattttggtatgaatacaaataatcttatcatgaagaatttccagctggtcggcaactattcgtttgacggctcaagaaatgtagaggtgcacgattcaaagcttatctcaaaggatgccttctggaatacggaaaatgtcacagtctatgattcatttattacaggtgaataccttggctggaacgcaaagaatctgacacttataaactgcacaatcgagagcttgcaggggctttgctacatcgacaacctcgttatgaaaaactgtaagctcataaacactacattggcatttgagtattcttcggtagatgcagagatttgcagtaaagtggacagtgttttaaatccgacaagcggagtgataagggcaaaagagattggcacactgactatcgaaaaggacagagttgacccatcaaagactaagataatatgtgagggaaaataatctatgtatgattttgacaccgttgtagacagaagaaatacaggctcactaaagtgggatgtggcagaaaatgagctcccgatgtgggtagcagatatggattttaagacagcaccccagataatagatgcaatatcagagcgtgtttctcacggagtgtttggctattccatcattccggatgagtggaatgatgcgtatatttcgtggtgggacagacgccatgggcttaaaatcgaaagagacagcctgattttttgcacaggggtcgtaccggccatatcatctacagttcgaaagctcacaacacctggtgaaaatgtgcttatcatgacaccggtatacaatatattttttaattccatatttaataacggcgtaaatgtacaggaaagcccgcttggatacgaaaacggcagatattttgtggattatgacaggttggagcatgacctttccaatccacagacctcgcttatgatattttgcaaccctcacaatccgtgcggtatcatctggacaaaggatgagcttgcgaaaataggtgcactctgcaggaagtacaatgtgacggtcatatcagacgagatacactgcgacatcacagcaccgggaaaatcatacgtgccgtttgcggcagcatcagaggactgcgccgatataagcatcacctgtattgcaccgaccaagtgctttaatatggctggcttacagactgcggcagtgatggtgccaaataaatttttgcgccacaaagtatggcgtgcattaaatacagacgaggtggcggagccaaacgcatttgccatcacggcagcagttgcggcattcacaaagggtgagccgtggcttgaggagctcagaaaatatctctgggaaaaccgcaaaaaagtctgtagctttgtggcagaaaatctgccgcagatacatgtagtggatgccgatgcgacatacctcatgtggcttgactgcagtgcactcacagatgattctgtggcatttacgcagatgattcgcgaaaaaacaggactttatctgtcggagggagctgagtttggaggcaatggacgttactttgtgcgattgaatatcgcatgccctagggcagtgcttatggaagggctggaaaggttaaaaagagctctcgtttaagctgaatatgtacattttttaaaataaataagaccggtgatcggccggtcttatctgatataattaaacatttatggcatacaagatttagaaatatatcatgcatacgtttgttttctgattcgatagttagtatacactaacataaattagaagtcaataacaaatatggaattttgatattattttggatttttataaatcacgtacaaatcaaaaagaaaagttttgcaaacaataaaatgtatgttataataaaataactgaattaaaacgaacgaaaataaactcacgggggtattcgaaatgcgaaacaatgaatcatcagaaaactatttagagaccatacttattctcagcaagaagcttcctgtggtacgctcagttgatatagcaaatgagcttggatataagaaatccagcgtgagtatagccatgaaaaaccttagagagaagaacaatatcacagttagtgatgcaggatttatcacactcacagagtcaggaagacagatagcagagatgatatacgaaagacatgagcttttgtcagagtgtcttgagaagcttggtgttgataaggagattgcagcagaggacgcatgccgtatagagcatgtcatcagtcctgagagctttgaagcaatcaagaagcatatacataagagctgatatatgaaaccagtaccgcagggtactggttttttagtgtatcgtttttcttgtatatatgagaaaaatcatctataatagtgaagctgtaatcggcgacataaaatctgaaaggggaaaagatgaaacagatattaaaatatttgaaggagtacaaaaaggaatgcatctgtgctccgttatttaagctgttggaagcatcctttgagcttatagtaccgcttgtcatggcggcaatcattgataacggaattacggcttcggacaagccatatatatggaagatgggaggtgtgctggtgctgcttgcggcagttggtctggtaagctcggtcacagcacagtattttgcggcaaaggcggcagttggtttttccacaaagcttcgccatatattgtttgaaaagatagagtcattgtcattctcaaagatggatacagtgggcacatcgacacttatcacgaggatgacaagcgatataaaccaggtgcagtcaggagtcaatctggtacttcgactcttccttcgctcgccatttattgtattcggagctatggcgatggcttttacagtaaatgtaagagcggcaatggtttttgtagttaccatacctctgctttcaatagtggtattctcagttatggttgcaagccttccgctttacaaaaaggtgcagagctctcttgacacagtgctttcacacaccagggagaatttagagggaaccagggttataagagctttcaataagcaaaatgatgagattgacagcttcaacagggacaacgagtttttaaccaatatgcagcaggttgtaggacgaatctcagcactcaccaatcctctgacatttatcattataaatatcgcaacaatcgcagttatcgtatcaggcggcaagcaggtatacgcaggaatcctcacacagggtgaggttgtggcacttgtaaactacatgtcacagatacttgtcgagctgataaagcttgcaaacctcatcgtacaggtgacaaaggcagtggcgtgcggtaatcgtatagcggatgtgctttctattccatcaaagcttcctgagaaaaatcctaagctcattggtgcaaaggacggcgcacctgaggttgagtttgaccatgtctgcatgacctatgagggagcggccgatgagacactcacagatataagctttacagtgcaaaaggggcagacgatcggaatcatcggtggtacaggttcaggaaaatcaagccttgtaaaccttatcccgaggttttatgatgccacaaagggtactataaggattcagggaaatgatataaatgactacgatgcagtgcagcttcgagacaaaatcggtgttgtaatgcaaaaggcagtgctttttacgggaacgatagccgacaacctgcgctggggcaaaaatgatgccacagaggaggaaatgtggaaggcactcgatatagcacaggcgacagaggttgtaaagggtaaagagggaggccttgactacatgatagagcagggcggcaagaacttatcaggcggtcagaagcagcgtcttacaattgccagagcggttgtaaaggatcctgacatacttatacttgacgacagtgcatcggcacttgattttgctacagatgcgagtcttcgcgcggcattaaagggcatgcatggtgacaagacaatatttatcgtgtcacagcgtacctcatctatccagtttgcggacaatatcatagtgctcgacgacggacagatggttggcttcggacctcatgaaaagctgcttgagacatgcgagacctacaaagagatatatgattcacagtttaaaaaagagtcggatatgaccagacaaaaggaggtgtagagtatggctatggataatgcgaagatgaataaagcaggcacaatgcgcaaggtattaagatacatgaagagatatattcctttgcttgtaatttcccttgccctgtctattgttacagtggcgcttacgctttattttccaatcctcacaggacgcgcaattgatttgatcgtaggaaaaggaaaggttgattttacagctatgacagccatcctcacaagagcagcaataatagtcgtcatagcagcagcagcccagtggcttacaaatatctgcaacaacaggatgacatacaacatagtgagggatataagacgtgatgcatttttaaacattgaaaaaatgccgctttcctatattgacagtcactcacacggtgatatggtcagccgtatcatcgccgatgtagatacattttcagagggacttttgatgggcttcacacagctctttacaggaattgcaacaatagcaggcacgcttattttcatgcttacaatagatgtgaagatatcatgcattgtagtgctcatcacacctctgtcactttttgtggcaagctttataactaaaaagacatattccatgtttcagctacagacaagaacaaggggagagcagacatcactcatcgacgagatagtaggaaatgaaaaggtcgtacaggccttcaaccatgaggatgaggcgcttgaacagtttgacgagataaatgacaggttacagaaatgctcactgagggcaacatttttctcaagtcttacaaatccgtgtacacgttttgtcaacagtcttgtgtatgccggagtcggaatttttggtgccatgagtgcactcaccggcggaatcacagtaggacagctttcatgcttcttatcatacgccaaccagtacaccaagccgttcaacgagatatcgggtgtcatcacagagcttcagaacgcacttgcctgtgctgctcgtatcttcgagctgattgaggagaaaaaggagataccggatgcttcggatgcggtaatacttgaagaggctgacggacgtgtggacatagaggatgtttatttctcatatgtgccggataaaaagcttatcgaggatttcaatctccatgtaaagcctggacagcgcgtggctatcgtaggtccgacaggatgtggaaagacgactattatcaatctgcttatgagattttatgatgtaaacagtggaacaattaaggtgagtggacacgatatcagaaaaatcacgcgagagagtcttcgtgacaactatggtatggtgcttcaggagacatggctcaagaagggtacaatccgtgacaatatcataatgggaaagcctgatgccacagatgaggaaatcattgcagcagcaaaggcatcccatgcccacagctttatcagacgtctgccgaagggctatgacactgaaatcggtgaggacggcggctgcctgtcacagggacagaagcagctattatgcatcacaagagtcatgctctgcttaccgcctatgctgatattggatgaggctacatcttcgattgatacacgaacagagattaagattcaaaaagcgttccttaccatgatgcagggcaggacaagctttatagtggctcatcgtctgtctaccatcagggaagcggatattatccttgttatgaaagacggaaagattatagagcagggcaatcatgagagcctgcttgcagcggacggattttatgcgaacctctacaatagccagtttgcatgaatatagccaatgagtaagagaaggcgaccggcgcacgggggtgaattccccgtgccgccggtcgccttcacatattattaaaagatacaatgcaatccacacttactgcgctgcatcaggagctacatacgagtatgcattggacatctttgcagcattgtttgtcagagtgacagcctctctgtagtaggcaacaacaggagtgcccttatccacagcgttgaacagctgctctgcaaaagcaggcggcacattgatacatccgtgtgagccggaggttttgtaaattgttcctccgaaggtatcacgccagctggcatcatggatacctatattgtaggcaaacggcatgaaatagctgacaggagaagagtaaccctcaccgacaagagtagcatttctctgcttgtaaacaatcttgtatacaccatctacggaaccattctgacgggcgagattacctgatacgaaatccgactccatctggagagcaccatccttgtaataccacatgtgctgctttgtgtagtcaatctctatgtatgtattacctatgtcgtcagcgcctcggtagagtgctgtctgctcgtaaacaggctctctttccactggcttgcctccctctaaatcggaaagaagtttggccttctcatttttcttgcttactacccatccgtagtctccaccacctatttcaatagtgtcaccggacgatgtcttgaatgagcgtttgcggccgaaggtattgtacttggaagcaagctgctggacatatttagtgaccttggcatcatctatgctcacgctgccgtcatctgagatgcttagcatatcaaggattttggctgagtcaagcttctcatcggcaccttcaattttgtaagtgacagttgaagcagtgtatttgtcgagggcttctttttcatttttgattgtatcgctttcctttgtgatttttggagcttcataacattcatcacttaagctaagctttggaagctcgttgtccagggcgtcctttacctcggcaaggatgctgtcatatatcggtttgcagccatttttctcttcaatcacatcgtatttgccgtcttttatctcgatgtgggcatcctccggattctcaatgtagtcatcactgaaaatatcaagagccttgagcttttccgccaaagcggcatcgtcatatttggacgaaccctttagagtatagttttgagctttgaaaagactgacaggccatgtaaaagcattctggctttttatgatttgctcctcgtcaccgtttgagacatattcataggaaaaatcaggtcccttaagtgagaagctgttgccttttctatcagtgattgtgagcaggtagtcgcggcttagggctgtatttttttctattgcctcttttgcggttttccctacgtattttacagagttaatctttgtgttgaacagatagtggctgctaaaataaaaggcaaagccaagataaacagccaaaatcacgccaagcacaacggcgcaggttataagtacttttttcttcatgtaaatcgacctccttggagatatgctgttgctgcccacaccggggtgtaggcggcagctaaaatcagttacatttgtgaagatgtgacacatccatatagtcaggcagaccattcttgtaggctacagcggtttctccctgaataagtggctttaagtattcgataagctcaggcttcacatcattgccagcatcattgatccactctcttggcacagacttggcctcgtttgcgatatccttgatggcagaatatgtgtattctacttgataaggatcatttgagatgcgcttcaagcataccattgatgcggtcacaccctctgctgcaatagtgacaccctttttaccctgagcaaaagattcctcgatatcggttaatgatgcaagatgtgaggcacagcgctggagtacgtttacctctactgagcgaaccttgacaccgatgttttctttcacaatgaactcaagagcctttccggcaccgcttagctgctggtgtccgaactggtcgcatgaggcatttgatgatgtaatgtatgagccgtctgcgtcatgtattccttcggatacggcaactattacattgttagtgtgcgcaagggcttcttttatatcggcaacaaatttgtccttgtcgaaatccacctcaggcagatatatgaattgaggcgctgtattgtactcattacgtgcgagcgcggaagcggcagtgagccatcctgcgtcacgtcccatgatttcaacgattgtcacactcttaacagcatagataaaggtatcatgggctatctcgagcatgcttgatgcgatgtatttggcggcagagccaaatcccggagtgtggtctgtcatgcacagatcattgtcgatggtttttggaatccctataattttcacatcactgttgattttttttgcataatcggataactttaatacggtatccatcgaatcatttccaccgatgtaaaagaaagcctttacggagagcttatcaaactggtggaagatgtatacatatggtgaatcatcatccttgtaatcagggagcttgtgacggcatgagccaagatacatggcaggtgtggtcttgagcttttcaagattagcatcatctgcaaaaatatctgacagattgagataattctcatttaatatgccgagtattccgtttacggcgccatagcagatatcgtatttctcggagctttttactcctgcgatgactcctgcaaggcttgcgttgattgcaacagttgggccgcctgactgggcgacgatacagtttgactgattcattgtaatctccttattgtgtattttaactattctcttctgtaagaatagttatgatataatttaaaatgatgattaatcagattactacatgctacgcattcccgtaatctgactacacctcgaaatccgctaatttcctgcgtacccgcagcaaattgctactttctcggtgtagtgcgggtcactaaggtatacatcgaattgcatgcaagcatgcatcgatgataccttttgaccctttaatcatatagattgtagtatcaaacattatttttagcaagggttaaaatgaaaaatatgaataaatacgaaaattgcttattgtgtcccagaaaatgtggcataaacagaagaaccggacaaacaggtgtatgtggcgtttcatctgaaataaaggtggcgcgcgcagcacttcattattgggaggagccgtgcatatcaggaaaaagaggaagtggggcagtttttttctcaggctgcagcctacactgcgtgttctgccagaacagggagatttctgacggaaaagagggaaaggtaatcagtaaagagaggctgagtgatatcttcatggaactggcgggcaaaggcgcaaataatatcaatctggtcacaccagggcagtatatccctgatatagtgtgggcggtaaacgatgcaaaaagccgtggcatgaagcttcctattatatacaatacgagcggatatgaaaatgtgacagagctaaagctgcttgagggcatagtggatgtgtatcttccggattttaaatatatggacagtacgctttcggcaatgtattcaagggcaaaagattatccgtctgtcgcaaagcaggcgctttcagagatggtcaggcagcagccggatgtcgtgattgacgatgcgacaggactcatacaaaagggagttattgtgcgacagcttctactgccgggacatgtgaatgatgcaaaggctgtacttaagtacctgtatgatacatatcatgatcacgtatatataagcatgatgagccagtttacgccgattgcactaaaggattatcctgagataaaccgcacagtgacaaagagagagtatgaaagacttgttaactatgccctcgaaataggaatcacgaatgcatttatacaggagggtgacgtggcaaaggacagcttcattccggcatttgactgtgagggagtatgatatttaccgtttttcttaataaaatagtaagaattggcagggaaaaatgactggattttgtgacgtcggtgtagtactatggttatgtgatattttttaactgtgaaggtactgaacagttacgatattttgttattactcacatcccggtgtgacagacgataatgtttttaatcacacaggatacattattcaatagaggatacattgatgaaaaatataggagaacagcagataataattgaatgtccgaatactatctttcatctatacatcgacagtgaggatgagctttcaaaggttaaggtgtttatgaacaatataaagcatgttgattcgataagtctgcatgatatatacaactggtgcaacagacagcatgtgcagtacacgacgacatttaattatgacagtaaaatgacctggacagaaatgataaaatcctacatattttacttcagacagaagcttagatatgtaaataatagtgataggatgatagaaacatgagataccctgaatttctaaaggatagaggaacaataggctttgtggcgccttcgatgggctgtacaacagagccgtacaggagtgcctttgacaatgccattaaaaggtttcacagcatgggttataagacgatagagggacctaactgcagatgcgacagtggcataggtatcagcaatacacctaagaagtgcgcagaagagctgaacgagagctatgcttctgttgacagtgatgtgcttatatcctgtggtggtggcgagctgatgtgcgaggtagtgccttatattgattttgagcgcgtgaagcagtcaaagccgaaatggtacatgggctattccgacaacactaatttcacatttttggaggctactattgcagatacagcaggtatttacgggccgtgtgcgggcagctttggcatggaggtgtggcatgagtcacttaccgatgcgtttgatctgctttgtggcaggaagctttcatttaccaattaccctatgtgggagaaggaatcgataaaggatgagaatgctccgtttgtgggctacaacctgactgaaaagtcgtgcatcagctctattcctgcggtggcaaaggaaagcaggcttaccatgagaggcaggctgcttggtggctgcatggattgtcttatcaatctgcttggcacatcgtttgaccatgtaagggaatttaatgagcgctacagtgatgatggtatcatatggttccttgaggcttgtgaccttaatgtgatgggcatgagaagggctatgtggcagatgaaaaatgcaggatggttttcaaatgtaaagggctttcttatcggacgcccggcgcacttcggagaggaaatgtttggcatagaccacagacaggcgctttcatcactgcttagagagtttaatgtgccgatcatcatggatctggatataggtcatatgtcgccgatgatgcctgtggtatgcggaagcatggcagatgtcagcttcgacggaagcaactttacaatttcgtatgatatagagcagtagattggaggaaaaatgattagatcaataaagaaaaaagcaaagagtattgtatgtagcgtgcttgctgcggtgacactgtttacaatgaatccggttgtatttgcaacagagacagctacgcagactgatacagtttcaagcgttgatgtatcaggcagtgacgcagctgataagagtaacacagacagtactgcagacagtacaacgacagccggcagtgagacaaacgacaaggtgaccatcagcaaaaatgataagccatacttaagtcttggagcagacctcacaccggatcagagagcgacagtgcttggatttatgggaatcgagctcactgatctggacaaatacgatgtggtctatgtaaataatgatgaggagcacaagtacctcgattcatacatcagcaagagcgagattggcacaaggtcactttcctcagtactcattacagaggataaaaagggtgcgggtcttagtgtttccacacacaatatcaattattgtacggtaggaatgtacaagaatgcgcttgccacagcaggcatagctgatgctaaaatcatagtcgcaggacctttccctatttccggaacggcagcacttgtaggcacactaaaggcatacgaggagatgacaggcaagaagcttgacgacaaggtgacagacgcagcgatggatgagcttgtcacaacaggagagctaaacaagagcattgacggcgattcgcaggatatcgaggcaatgattgcagacctaaagaagcagctcgccgatggaaggctcaaggatgagagccagataaaggatgcgataaaggaggctgcaaaggattacgacctgaagctttctgatgatgatattgcaaagctgacatcgcttcttatgaagcttaaggatgccaatatcgactgggattcagtcattaaccaggcacatgactgggcatcaaagcttggcgataagataaatgacccgggcttctgggaaaagattggtaactttttcatggatttatgggataagataaaatccctgttcagctagaaaaagctacaggagacagtaagaaaaagcagaatatgaatcagataactccctgaaacgtaagcatgagctgcacgttgaagggagtttttatattatgattaaagggtcaaaaggtatcatcgatgcatgcttgcatgcaattcgattaatcataaatgaggggcaaaataccttttgaccctcatatcaataaaaaaataataaatttctgccgaatacattgatacaaaggtcatattctattataattaaatggataatggattaatgtaaacaatgcacataagaaagaggggatttgatgataaagataaataaatttctggcagcctctgtcgtaacattgtcattagctgcatgtgacctggcaccatacagcagcatagcagtctatgcggatcaggcggctaaggttgtgtgtgatgagagatactgggtagcggcgagaagcggaccgggaacagagtatgagctggagcacaagctttcaaacggcaaggatattactattcttgagcagaccacaggtgcagacggcaaggtgtggtacaaggcaaagtacaatctggcagcaaataacgaggagtgtgtcagctatataaggtctgattttgtatcagcaggtacagctgcatcagacaatgcgcagacaggggatgcttcggcagacaccggcaatgcggatgccatacagcagaataatgaggagcagcttgccattgcaaccgcatcgggagcatatgctacaggtacgattacaggtggcaatgtgtatgtccgcaatgcagcaggcacatccggcactaccaaggttgtctcactcaactggaaccatcaggttgacataattggagagaccagggtaaacggtgtggtctggtataatgtcaagggtactttaaacggcaaggcatttacgggctggactatcagtacatacataaaggtgacatacaataatagcggagacaataccgattttgtcacggctatgaagaatgcaggctttcctgacagctatattccaaaccttacagcacttcacaataagtatccaagctggacatttgaggctgtaaatacaggtttgaattgggatacggtgattgaaaatgagagcgtacatggaataaacttagtatctaaaaatgcagataatgcaaaaaaatcaacggaaaatggtgcatataactgggaaacaaataagtggtttgaatatgagccaggatgggtagctgcaagcaaggattacattgcatatattatggatccaagaaattttcttgatgaaacaaatatttatcagtttcaaagtcttgtatatagttctagcgaaaacttatcaggtgttcaatcaatcgttaagggaacctttatggaaggaactaagaactattctaacaatggtgagaaaatagattatgctaggacatttttagatgttgcaaaagccacaggagttagtgcatatcacttatctgcgcgagttaaacaggaacagggaaaaggaacgagtcctcttatttctggggtatattcgggttatgaggggtattataatttctttaattttagtgcgactggaagtacaaaggaaaaaatataccaaaatggtttagcgtatgctaagaagaatggatggtcaagtaggacaaaatccatatccggaggggcggaaaagattgcaaaagattatgtcaatagaggtcaaaatacaatttattttgaaaaatttaatgtggttgatagtaaatcactttatagccatcagtatatggcaaatgtgacagctgcaattacagaaggacaaaatctgtcaaaaggatattctgataagaaccaggcatttgtattcaaaattcctgtatacaacaatatgccatcgtctgcagttggttttaataaagctggtgatactaacaactatctgcaagcactgtcaataagtggagtgtcactcacacctgtatttaatggagtaacaacaagttattcagcggttgtttcaaatgctataagttcagtgactgtctcagcaaatgctgtatcaggtaatagttatgtttcgggtacaggtaattattcacttgctgttggaaataatacaataaaaataaattgtaagtcacaaagtggtgaaacaagaacatacacaatcactataaacagacaaacatcagctaataatacaaataatactgcgtctggtacagatgtaaatatttcatctgatacatataaaataggaacatatattactggagttgcaccagaaacaatggcgtcatcattcataaaaaatatttcggtttctgcatctggttcaatcaaacttttaacggaatcaggaaaagaaaatacaggaacagttgcaacaggaaataaggttgctgtatatgatctttctggtaatttgaaaaaaacatatgatattgtaatatatggcgatgtgtcaggagatggagtggtcaatgtaaaggactctatgataataagacgacatattattggaagaagtacattgagtggtgcatatatggaagcagctgacactagcaaagatggtaccataaatgtaaaagattctatgattatacgtaaccatattctcggcagaaaaaatatagagcaatagaggtaagaaaatgaaaaagattacaagttatattttatcagttttgataatgactatagttgtgttttcaaataagaatattgtgttggcagcaggaagtatttctgtttcagcaagtaaaacaacagtgaaagttggagatgttgtgactataagtacatctatttcaccaggagagtatggagtaaatgcaacattaacaaagagttcgggagcttttgagtttgtagaaggagataatatatactctgatggaggaactccaaataattctataaaagttaaagctgtttcggaaggtagttgtaccttttcagttcgggtgattaatgcgtttgatgaccaattgaaagagacatctatgtcatctggcagtgttactattacagctacatcagcttcatcaaacaatgattcaaacagcaacaaggataacaaggacaattccggcagcaataccggcaatgacagcaatgcaaataaagataatgaaaacaaagaggaaaagaaatcctcaaacgcatctcttggttcgctggttatctcagcaggcacgctttcccctgagttttctgctgcgacaaaggattacacagctacagtagattacagctgttcaagccttgcggttacagcaaatccggctgattccaaggcgagtgtgacatccgtcacaggcaatgattcacttgaggttggagagaatacggtcagcgttgttgtgacagcagaggacggcagcacaagtacatacaatatagttgttaccagaagagccgaggatgatccggagaatgcagataagcaggataactggaagaagttcgatataaatggcacagagtggactatggtaaatgacattccggaggatgttgttcctgaaggctttgagcactcaaagacagtgattgacggacttgaatacaatacccttcatggcacatttggtgatatcacgcttgtgtatttacagtcggaaagcggcaatgggctttttgtatatgatgcagcacagaatacagcatatgagtttgtccgtatcaattcagagtcacattttatagtggttttactgcctaaggtggatgatgtgcctgagggatataatgagatatcgctctccatagagggcaagggtgtggcaacagcctaccagaccaaaggcgaaaaaactgatgatcagacaaaggatttttacctcgtatacgctatgaatgacaatggtgagagtggctggtacacatatgatagcgtagatggcacatatatgagaactgagctcagtacacctacagtggcacaggaggaaaatgatacaacaaagagtgagcttgtcccgggaattgctaataaatatcttgttttagctgcaatactggttcttattatcattattctagcattacttcttctggtggttattgtgaaaaataagaagcgcacagctaatgaagaaaatgatgaagaagacgatacaaaagagttcgatatagaggaaaatgatatagaagctaatgatgatgatgatgcacaggaaccggctgaagaatcgcagatagatgagattcaggaatcggctgaagaatcacaggtagatgaaatccgggaaccggctgaggaatctggcgaagagtcacagatagctgagattttagaatcagacgaaaatatgggaagtacagaagcatccgatgcatcctatgtcggaagaaccgtagaaattacatccgatttaaagaaaactgctgagaatgaaaaaactgattttgattcaaaagaggcttcagatcaggagaatgctgcagatgatgataccttgaagaatcaggttcaaatggcacttgatggctttgtcaatgaggaaaataagccgtctgagactatagacagcagtgcaaaggatgacaatgaggatgacagtgaagatgatgatttgcagttcatcgacttaaattagtgaatatgactggaggatatgacttgaaaccatatacaagtaaggctaaaaaagcaatagatttggctgtacgtatatcaaagaaaatgaattacagctatgttggaacagagcacatactggctggccttataaaagagggcaccggtgtggcagctgaggttctaacagcctgcaatgtggaatatgataagcttatttcgatgattgaagacctgatttcaccgggggataacatcgaagtgatggaaagggatggctattcaccaaggacacagagagtattggagcgtgcatcggaggaagccgatagatttgagtgcaatgagataggtacagaacatttgctgatggctatagtactgcagggagactgtgcagctgcaagacttttaaacaccatgggtgttaacagtcagaagatgtttatagatattcttggtgcaatgggtgaggatccatctgcatacaaggatctgatgaaaagctacaatacatcatacaattctgcgactcctgtattagatcagtattccagagatttgacagatatggcagaggcagggcttcttgaccctgttataggcagaaaaaaggagatggagcgtgttatccagatactttgccgccgtggcaaaaacaatccatgtctgattggagagccgggagtgggcaagaccgctatagtagaaggacttgcgcaggatatagtcagtggcaatgttccggatattcttttgggaaagagactggtttctcttgatatgtccgggcttgtagccaaatcaaagtatcgtggtgagtttgaggagcgtatcaagaaggtgataagcgaggtttcaaatgccaaaaatgtactgcttttcattgatgagcttcacactataataggtgcaggaggagcagaaggctcgttagatgcatctaacatattaaagcctgcgcttgccagaggcgaggtacaggtaatcggcgccactaccatagaagagtaccgcaaatacgtggaaaaggatgctgcgcttgagcgccgtttccagccggtgatggttgaggagccgggtgtggatgagacaatagagatactcacaggattaaaggggctctatgaaaagcatcatggtgtcatcataacagatgagggtgtgaaagcagcagtaaacctttctgcacgatatataaatgacagatttttacctgataaggcgatagacctgatggatgaagcggcagccaggataaggcttaagaatctgacatcatctgacgagctgcttgctctgaaaaaagagataacagataagcagaaccagttggaaaatgctttgtcgaaaggagatctcgcagctgccggtgcgcttatgtcagaaaaggaagtgcttgaaaataaacagcagaagcttatcagaaagaaccgtcgcacaggagccaaaaataagcctgtagtcggcgaaaatgagatagcggatgtagtatcgggatggaccaaaatacctgtaaataagcttacagagtcagaggcaggacgacttgcaaagcttgaacagatacttcacaagcgtgtaataggacaggaggaggctgtttctgctgtcgcaaaggcagtcagacgaggccgtgttggtttaaaggatcctaagaagccgattggctcattcctgtttttgggaccgacaggagtaggtaagacggaggtgtcaaaggcgcttgctgaggctgtctttggcaaagaagatgccatgatacgtgttgacatgtcagagtacatggaaaagcatagtgtttcaaagatgattggttcaccaccgggatatgtgggccatgaggagggcggacagctctcggagaaggtcagacgcaatcctttttctgttatactgtttgatgagatagaaaaagcacatcctgatgtgttcaatatacttttacaggtgcttgatgatggtagaatcactgattcacaggggcgcacggttgatttcaagaatacaataatcatcatgacatcaaatgcaggagcttcttctattatagaaccaaagcgccttggatttggtgcaggtgaggatgaaaagcaggatcacgagcgtatgaagaacagtgtcatggaggaggtccgccgtatatttaaacctgagtttttgaaccgaatcgacgagactattgtatttagagctctcaacaaggatgacatgaagcatatagtgacacttcttgtaaaggagcttaagaaacgctgtaaagaacagcttgatatagagctcacagtgcgcgacagtgcaaaatcctttatcgtggataaagcctatgacagaaaatatggcgcaagacctcttaaacgaaaacttcaggaggagattgaagaccgtatgtcagaggatattattaccggcaaaattaagcgcggcaataaggtaataatttctacgaaaaacaaacaaatttcattgactgttgagtagaattggatttataattaatatatcaatatagctacgggaggataaaaatggctgtaataagtgaattaatccgtactgaggaaaacggaaagctcagcttcggagattatacattggctgcaaaggcaaagcttgacaattttgagaaggatggagatatctacaaggtaaagacctttaaggagattacaaagctcgaaagaaacggactctttgtatacgagtctgttccgggaacagcggttatggatttcgaggagactgctgatacagtgacatttactgtggagggacctgaggatgctcagattactcttggccttgaagaggagacagagtacgaaattgatatagctggagctgttgcaggtactatgaagacaaatctcggcggcaagctcagcttaagcgtagagcttgagggtgttgattcagtcgatatcaaagtatcaagaaaatagagcatatttttagcccggtgaaagccgggctttttgtattttataaaggagaacaatatggcaaaaggaaagacctctgtatttttctgccaggaatgtggttatgaatcggcaaaatggatgggacagtgcccggcctgtaaggaatggaatacatttgtagaggaaaccgtagataaaaagtcgataagctcgtcgggaaaagtaaaaaaagaatcaaaggcggcacaggttctgcctctttcggcagtaaaaagcgagaaagaggagcgtatagtgacaggtatagccgagtttgacagagtgcttggtggaggaattgtgagggggtcacttgtgcttgtgggaggagatccgggtataggaaaatccacgcttctacttcaggtatgcagggaactttcacaaaaaaaggtgccattactttatgtgtcaggtgaggaatccctgcatcagataaagatgcgtgccgacagacttggtgattttacggattcactggagcttttatgtgagacaagtcttgatatagcaaaggatgtgattcaacgaaaaaaaccggaggttgttgtaatagattccatccagactatgtacaatgaggagatagcgtcggcaccgggcagtgtctcacaggtcagggagacaaccggagtgcttatgcagcttgcaaagactctgggtatttctgtttttatagtaggacatgtgacaaaggatggtgcggttgcggggccgaggacgttagagcatatggttgatactgtgctttattttgagggtgacaggtatgagtcgtacaggatacttagaggcgttaagaacagatttggttcgaccaatgagataggcgtatttgaaatgaaggcggagggacttgttgaggtggaaaatccgtcggagtatatgcttagcggtaagcccgagggagcatcaggatcaattgtcacatgttccatagagggaagccgcccgatacttctcgagatacaggctcttgtatgtcacagtttttttaataatccaaggcgtacagcaaatggtacagattataataaagtaaatctactcatggcggtccttgaaaaaagagccaacctgtcactgtcagactgtgacgcttatgtgaatatagcaggcggtataaggatgaacgaacccgcgatagaccttgggatagtgcttgcaatcgcatcaagcaaaaaggatattatagtgcgtgaggataccatatgctttggagaggtaggcttaagcggagaggtacgcggagttaccatgtccgagcagcgtgtggctgaggcaaagaagcttggctttaaaaagtgtattgttcccaaagtgtgtcttgcaggagtgtcgcatattagtggaattgagattgtcggtgtggcaaatatcaaggaagcgatagaggctgtcagatagtaattgcgagaattgtatataataaacagacaatttagaaaatttgtgttttttaaggtagttttactactttaattaattgcagaaaatccgttgacatatgtgtgccgggatgatattatatcaaagctgactcgcgggacacattgagttgtagagcttgtgagttgcattttacagacatgactttatagatattgctttgaaaataagttgaaaaagttatgaaaaaagttcttgacaaatgcaaaacattttgatagaataaacaagctgtcgcaaggcagagaacttaaaataaagttcaaaaaaataaaaaagtgcttgacaaacgaacagcgatttgataaaataaacaagctgtcgcaagagagcaaaacatcggatgtcttgattgttagatattcttaagaatagaatatttattcatcaaatcatttgtatgaagttttcaaggtacattgctgtgattaccagttttagttctcacagactttttgactgttttatcagtcattagaaatcttaatctcttaaaatctctaatcgctggtaaaaccagtttttttataaatccggcagccacctaccttcccataccgttaccagtatagtattatcggccgcttcagtcttaaccatcgtgttcgggatgtggacgggtgtttcccaaaagcgcatcgccaccggaagtttgaacacttagcgaggtgttttcgagcttagtgtgaaacttgttcgatttgcgcaagcaaagtcgaacttcctcagcttacctcagtgttatttgttattaaataatcattaataactcaacagtgaaaaactctctactcaatttccttagaaaggaggtgatccagccgcaccttccgatacggctaccttgttacgacttcaccccagttatcgagcctgcattcatattttaaaacttctacgctgtttgtatgtataaatatatgatactgatttattgaatttactgcaacataatcttgaagtttatgtaatgtatttcggtaacaaaggtattcagcaaagaccgtttacgctatatcattttttgagtaattccaatgccctgtccattggtacgcagtctgcatatcgttcaggccagagaaattcattatagtaatggtaagcctgttccctagtcatgtactcattgtcctgcgtagaatttgcataggcaggaacaatcatgtgtaagccatgctcaaaaccagcctctaccgtggcattgatacagaaatccgtcataatgccacaaatcatcacatctttttcttcctttgcagtcagatactcaagcagaccactctcttttttgaacgcactgcatacggacttgataaatcgtttttcatcaggcatcggttgaaactcggaatatacctcaaactcatcatccccgatagagaatccggtacctggtccatcatcatgttgtacataaataacttctataccttgttctcgagctgctccaatcagctttttgatattactgacaaactttctgaacgcatataagcgttcatccacgataccattctgtgcatctacaaccaataaaaccatgaatactctctccttttcgagctttttgctttgattcaaataaactaaattcgtatattataatacagcgtaacttctgcttcatacaccgattctgtatgagaatcaaatagcacccattccactaaatcaaactgccccggattctcctgcagaaatctggcaactgtacgtaccgcaatctttgctgcaagctctaccggaaaactatatactcctgttgatatggaaggaaatgcaatagacctgattccattatccctagccagcttcatagaattaaaatagcagttagcaagaagctcctcttctctattccttccaccatttcttaaatagtcccactctgagcacattcttttgactttgccatcattgtctatccatttctcgttgaatccatgtcataattacatctacaagataatcctgctgcacctgacttagttccttgcccggctgcattttatgccactttcggatgcactccctacagcatgttgccgttgcatgctgggcaataaatacaggatgaccacgcattggtgtctgtttaccatcatttgctatatatgccggagcttctctttttgtaataaaatcctttgcatgttgtctgattgtttccaacccttttttatttatgtaatcaatatctttctgcttcagatggaaactgcttcggaacttggaattatccagtcgctcaaataactgcctgtaccattcatccttagtcattaaaacttcactacttccggctcatgtgtaaatgatgaaaatgtagctgtcgcattttttaaatagaacacctctgtatttccatcatctgctgagtacatattctgtaaagatggataagcatcgagcatagactgccttgcttctcttctgtcatcttctacaagttctccggctacacgaagccactcaccatttttatatgcacagatttctaccttcgggtttgcgtgaatctgctttgaaacatcctttacctttccagtctgaatatacagcttcccttcaaaaatgtgtgcagttccaaaaggtctaactcttggctggtcgccttctactgttgccaaataatatgtctctgcttcttttaaaaattgtactactcgttccatgatgtaatcctcctgatagttacttaaataaatctataatgccaaagctcgtcttcttataaaccttattgtaagctgctttctttggattcttaatccatcctgcacattttttccgtaccctggaatcaaagctttcttaacagctcgcttggcttttccggttgttcttgcctttattgatttctttatactgggtgttctcattccaaacttcatcttaatcgcctccgttgtttcaaaaaatcacctgttattactatctatctaataatgatactcttatatataaataatgtctacaataattgggttggtgtctacttttagattaccacttcatttctgctccttttggacttcctcctgcctcccctccacctcaaagtccaatccgccgctatttctcactccaccacgcaaaaaaaggcggattgctttgcaatccgccagtctcaatcaaccagtctaaacctccatcagccaattccaccaagtaaagcacctgcaataagtgcaacaagtgaaagtgggacaaggacatatttgccaagtggtacaaaccactttccaataggcttatctgcacctgcattaacagcatcaacagcaaacttctttcctgcaacccagaagaacataattgctgcaagcattgcgccgagtgggcagatatagatagatactgcgtccatccagcctgatacaataccctgtattacaagtgacacaacacagccagccactgcaataattccaacagatgcaacacggttaagcttaagcttctcctgaatagttgcaaccggagcttcatacagattaacaagtgagctcatgccggcaaacagaacacatacatagaatacaattcctacaatcttaccacccggcataccattaaatacatttacaagatagataaacataagtccgggaccacctgaagataactcggcaccgcctgctgccatacctggaataataacaaatgcagctaataaagcagcaatagtatcaaatacagcaacatttcttgctgatgtaacaacattttccttatcactaagatatgaaccatagataacagttccgttacctgcgatagacagtgagaagaacgcctgaccaaatgcatatatccagagctttatatcaagaattcccttaggattaagagtaaaaatgtatttataacctgcacttgaaccatgaagcgtgaagatatatattccaagtcctacaaacatgatgaaaagcaaaggcatcatgaccttgtttgctttctcaattccgcctgcaataccaagtgccataataacagcagttacaaccatcgcgattataagccacatattattgccaaatgagcttgctgtacttccaaacataccaccaatagctgacatatcattgcccattgctgaaagctttccagaaaatgcaagataagtatatttgaatatccagccaacaactacagtatagcccattgccaaagccagtgagccaagcacaggaataaaaccaattgactcacctgcttttctctttcctgtacgcatctgcatacagtcgccaaatgctttaataggtccgcccttagtcgcacgaccaagtgccatctcctctataacacctgttgaacctatcagtattacaaatattacataaggtattaaaaatgtcataccaccccatgcagataccatatatggaaaacgccatatatttcccattcctactgccgaaccgatacaagcaagaataaaacctgtacggctcttaaagccatctctttccaattcaattccgttatttcccataactttagttcctttctttctcatattgtgaatagccacatttactatacattttcctgcaaagatatcttatacacaaaaaagcaaagaaaccattaccccttccgggtcatggctcctttgcctttgatgtctgtataatataccattgtgttattcctgtaaaatacatgttggttatctaaccataaccaaaaataatagttaaactacataatccacatctgcgccagatacatcacaactggcatcgtaataattgaaaacagcgttgacaggcagaccatacataccgcccgctcataatcctgcccgaatttctgtgcaaatattgccgtactcgttccaactggtgttgccgcagcaatcagtgtaatcattccaatctgaccatgtcccaccggtataatataaagtacaagcagtgtaagcaacggaattattataagcctgacaaacgatgccagatacagggatggattaagcagtaagtcacagattctgacacatgacagataatatcccagtactatcatggctgcaggtgtattaagtgctgcaactccagccatcgtgctgtttattacacctggcagtttaattcccgtaataaaaagaaacagtcctataacaagtgatattgtcacaggattgacaaataccttttttatatttatcatatccttgcggcgggttattatcacaataccgtatgtccactgcaacagattaagaatactggctctttcagaagatgctgcgcgtgctgtcagtgaaagtcttggagatgccggcgaaataaggctctgtctccgctcaagtgcagttcttgtcagcaatgtacttaaagattttatccatgagcagcctcatgtcagcttttcaatatcttctgaaccaaaagggtgtgacctgctgattgactctgtctcatcagcttatgatattccagacaatgcacatcttcttatgacagaagaaatctgccttgctgtttcatcatcacatccacttgcccataccggacacatatcagtagaacagatgatggacgagaaattcattgaccttgcagatactccatcttacgccggagtgttcaattcaatattcaataaatgtaagaaaactcctcagatagcctactcatgcaatgattacatattacagggcaagctcataagtctcggtcttggagtatcatttgttgcctctgtaacatggacaagcagcagccttcctgaaaacataaacctgctgcatatagatgactgtccacatttcagaagcatttattatcagccgcttggctcattctgctcagaaaatcagcgaatcttcgagcaccagcttgaagaatatttcaagaaattgaataaataatgcacctgtgtattttaatgcacttctaatggtgtgtcttcaccggctgcaaactgcacaacactcttaactgaagactcaaccatgtcagacacagcctgatctgtgaaaaatgcaatgtgaggtgtgacaatagtattctggaaagacttaagtatgatgtaatcgtgattaacaacaaggtcatcatacttacggtctgtacggataaaatcatcttcaccctcgcagcagtcagttccaactgaaccaatcttgccactctcaacagcctcaatcagattctttgtatcaacaagtgcacctctagccgcatttataaggataacgccatccttcatctttgcaattgaatccttattaatcatatgatatgtctcaacacttaaaaaagtatgaagcgaaataatatctgacttagcgtacaattcatcaagcgttacatattcaacattttcaaggtcttttgcagggtatgggtcatacgcaataatcttacatccaaatcctgaaagattcttaattactgcctttccaattcttcctgttccgataatacctactgtcatattctgcatttctcgtccacatataggaccaagtgaataatccgctgtgtgcgaacgcatcattacatacaaagccttgcggatacacataagcataagcattactgtataattggcaactgaatatggcgaatatccgctgtgtgcaacacggattccaaggcgctttgctgcctcaaggtcaacactgttatatccgattgtcctgaaaccgatatacttaacaccttctgctgcaagcttttcaagaacaggtgctgacaagtcacacatgccatcgcacaccgacatagcttcacagcctttgacactttctatatcatctgctgtaaatccgcttctattaatctgtaattccaccttgtatacatttgcaaatgtatcaaaatactgtttttcatctggacgaacgctgaatgctgctatcttcataatgtttcactcctcctacttaatccactcgtatgtaagttttccaagaatctcgattcccttaacaatctgttcctcagaaggtgtcgaatagttaagtctgaatccattagatttctggttctcatctgctaagaacgctgctcccggaactgaaagaacgcctctgttaatggcctcccttacaaatggtgcagaatccattccatctggcaggaatgccattacaaaaagtccaccctcagggtgaccgaaggttactgaaggatggaattccttcttcatgcactccatcatgagattacatttatgctcatacacctttcttgaatcctcgagatgcttgtcaaaatcatagttattaatatattcattacaaatgtactggaaaagtacagttgaatgtacatctgtgcactgctttgcaactgtaagcggtcctgtgagcgacttgttgaacacaagaaagccaagacggaatgcaggtgccattacctttgagaagcttcctgcatatataaccctgccctctgtatccattgatttgatagttggcacattttcacctgcaaatcttaattcaccgtaaggattgtcctctaatattgcgatatcatatttgcagcaaagctcatacactttttttctcttctcaagagaagttgtgattcctgtaggattctgaaaagatggaattgtgtataaaagctttgcatcaggattagcctttaaagcctcctcaagcgcatttatattcattccgtcctgctccattgggattcctacaagctttgcaccgtaagaacggaatgtattaaggcagcctacaaatgcaggctcttcagtaagcacaacgtctccttcattaacaagtgccttagttgtaaggtccgcacactgctgtccgcctgacactatgaaaagctcattattctcgaaatcaaagccttccttcttctcaagatatttcttcatggtatcacgcagaggtgtataaccttcactcagtccatactgtaataaagagacaggattctcgctgagtccctttgctgctatctcttctatctccttgcatgggaatgtctctgctgacggattgccaccaccaaaagatataatatccttgcttgctcctaacttaaaaagttctcgtatcatcgaaccatgtacacctgataaacgattagaaatctcgtattccatatatatatttcctccttcaaatacttgctaatgcaaaaaagagccagaatcccctaaagatttccggctcctttgcctttgattgctaacttcccaaatttttcctacttagcataaaaaaaacaaaaaattcaactacaatcaaacgctagatccattgaaaacactggattttaccacgattttcacttgtaaagtcgtggtatttttgttataataattgagtaggatatcatactcgtagaggtgtaaaatgtactatgattttttggtaaaaataccggaaaacaccgggaaaatttctaaaaacaaacgcggaaaaacaacttatattgaatatacttatggtcgaaaatatattccagataaaaaatacaatattccacagcgaacgaccatcggtaaaatgtccgatgaggattcagccatgatgtatccgaatctcaactttgaaaaattcttcccagaagtatcgctgccagaatgcaatccatctgcacgaagctcttgtatcaaggttggagcctttcttgtgataaaaaaaataatcgaagattatggactttttgatcaccttaattcttgggatgaacggggaaaaggattattacttgatcttgcagcctattctattatttcggaaaacaatgcagctcagcactatcctgaatatgcttataatcatccatcattgacatcggggcataagatttacagtgattcaacaatctccagattcctgtcggagattggctctgatgagcgaatggattttctaaatagttggaatgattgccgcaatcataaggaacgtatctatgtttcttatgattctacaaacaagaactgtaaagccggagacatcgaaaaagcggaatatggacatcccaaagaggatgtaggcgcccctattttcaactactctatcgcatacgatttgaataaccagctaccgcttctatatgaaagttatcctggaagtgtgattgatgtatcccagttacagtatatgattcaaaaaatccggggatttggttataaaaatctgggatttgttttagaccggggatatttcagcaaagaaaatcttgcctatatggattcatgcaactatggatttgtcataatggtgaaaggacgggcgtcttttgtaaagaatcaaatattgagccataaaggggagtttgaaaccaaacgcgcctgtgcaatcacacagtatcggacatatgggatgacagtaagagaaaagctttatacagacgatgatacagatcgatatttccacctgtattacaaatccagtcgagcgaatgcagaacgaacacagttagaaaatcttctcctacgaatggccgaaataatggataaaggaaaagggcgaaacatagaatttgggaagttatatgagcattattatgatttgacttaccatgaaaaaaatggtgtccgaaaattttatggttacaaagaacgtgaagctgtcattgaaaaagaattggagttatgtggctattttgcaattgtaacttctgaaaggatgtcagcagaagatgcactgctgctatataaaaatagagattcatcagaaaaactcttctgtagtgacaaatcatttttaggtaaccgctcactcagagtatatggaaatgaagcattggaatccaaaattttcattgagtttattgcacttattatacgcagtaaaatatataccatgttaaaaaaacgcatggctgaaatggccaaaagacctaattatatgaccgttccggcagcattaagagaattagaaaaaatagaattaatccgtcaaccgggtggacattataaagtggatcatgcaattaccgcaacacaaaaaacaatcttaggagcatttggaattgaagaggggacgatacttgcgaaagcagttcttgtaggaaaagaattagaaaatgcttttgccccggagacggaggaggatgaaaatggcacgaatcaagaatatgaagacgattgatttgaagatcgctgaaaatgaggaaaagcttcgtaaattgaaagaacgatgcgataatatatcagcagaattagatcagctatatgaagaaaaaaaggcactggaaaatcaggaattattacaagccataatgaacagttcaaaaacgagggtggaaattttagcatttttagaaagcaagtaacaaaagaaactcaacgctgtcaaataacttatgatggcgttgagtaggaaaatcttgggaagttagcattcctctgcctacagaacaacattttataaaaccaaaaccacatatgctctgttaacgtatcataactgtatatttttttagcttccttagggaggcttatttctggtgtcataatacaggactgaattataaattctatgtgtttctatgtgtacacgctatcttattataaatagagtgtcagaattaaaagtccatatagggaaatacttatataaatatgtggacgcatttggaaacacaaaatatgtgtatgcttggagattgacacccacagacccgacaccaaagggaaaacgggaaaagccctcacttcgtgaactggaacagcagataagacgggatattgaggacggtatcgacagcacaggcaagaaaatgacgctgaaatacgaagtcctgtctttaacagtatcagtacatcatcgtaatacttatgatacacgttgtccgtcttgatgaatgagagtagggcttgttcctgttcctctgtcaatgcgactttctctttggtatcattttctatgacttcacttaacttgaaatcaaaaggatttttccttacacaatcgtcttgtatggcgatatagaatgacgcttttaacgagcgtttatggttgttaatggtgttataggaaaagcctttgtctttcatgcgtaacgcccattccttagcgtcagagggttttatcgtatcaatgctcctggcacccaacttgtcctctttcaataaccgcatgagctgttcccgttgtttctgtgtgcttttcttcacatttgccctctgtgcgttctgtttggcgtagagttggcaaagcgtcattttcttgcctgtgctgtcgataccgtcctcaatatcccgtcttatctgctgttccagttcacgttcaaactgtcggcgtttaatctgtatgcggttgccattcataatgagccagccagcgtccttgttttcctctgccaagcgtcttagcttgttttctccgatacggaaatattttgacgcttcttcaatggtaagggtgtatttttcccatacgggaatatcgttgttattcatcagataccccctttcccatgtttcgtgtcatactggatataggggataaggtcggtgcggtttatcctctgtaaatgggcggtcagtttactggaaagggaagtgctgtatcttgccttatcaagcatagttcccacccgttccagtccacctaatgcgtcatgttcttccaagaaatagctgtggaagtcttgaaactgcaagtaccaaaacagcaaaattcccttgaggaaacacagcaatggctcacagagggtggtgtgatttccgctgtcaaaagtttttatttcttggaagaacatgacgcattaggtggactggaacgggtgggaactatgcttgataaggcaagatacagcacttctcgacgatggagacggagagattcgaactcttgaccccctgcttgcaaggcaggtgctctcccaactgagctacgcccccgttgtaatttggcagccacctactttcccataccgttaccagtatagtatcatcggccgtttaagtcttaaccatcgtgttcgggatgagaacgggtgtttcccaaaggaaggtgcggctggatcacctcctttctaaggaaatcgagtagagagtttttcactgttgagttatcaatagataacagcatatttttggtggcgatgcgtttttgggaaacacccgttctcatcccgaacacgatggttaagacttaaacggccgatgatactatactggtaacggtatggcacgaaacgtttttgagattaccttaatcggaaggaaaaaatctttcccattgtctttccaatgatttttcacatccagctctccaccaagaacaatcgcatggatatgaggatgaaaattcatggtacttccccatgtatggaggatacagatatagccgatatcagtcgtaccaatactcagtgagaaggtctaaatttttttgagacagaatcgtatacctgtcaattctgcctttggtttcacgaacatgaattgtcatgttggtacgggaaatgtcatcatcccagacagtcttcagcacctttttatataagaactttattgcagaccgatagtgattgtgagtttcaggagcagaaaacgcgtaccactaaatcagaatgaatgtaccgccgatttcggaataggcgtaccgttcgagcagaatttgcatttctggcagtcattgaagaaaacacaaattaccggttcaaacttgaacttaataaaatggaacaggtatattctgccaagctcgacgataaattaaagcagctccattctttaagacatgatatgaaaaaccatctgatagtaattgatggttatgcttcacagcacaatgataagaaaattcatgaatatattcataatatttctgaagacctttctctgacaaatgctgtagattcaggctctcatatcgtctcagctcttatagctgaaaaagaggacaaggcaaagttacaaaatatcagatggtaattccactgctttttaataaaaataaaactgcgccacagccttggcaggccatcgcgcagcgattttgttcaatcggaaattacaggaagtgtgactagaaagccaaaacggtatactgggaaaaagattaagaaaagaataaagagctggttttaattgtaaaatttatggggaactaacatcagcttattgacataaatttaaaaataagtataataatagttgagtaattgttcaactattattatttggaggtgaatatatgtcaaaaacgccttatatttgtaattgcgatgtaattcatgaggatattgtgaatgatgtgaaatccaagatgcagccaaaagatgattatatccagttggcttctttgtttaagctatttggagatggaactagagtacaaatcttacacgctctagaacagagtgagatgtgtgtatgtgatcttgcagtgctactgggggtaacaaaatctgcaatttcgcatcagttaaaggcattacgcctagcgaatctggtaaaattccgtaaagaagcacagatagtttactactcgctggcagatgatcatgtgaaagagattattgacaagggatttgagcatctttggcagaaataatattttttaatatgatagttgagtaattgaacaattaaacaaattacaaggagattatcatgaaacgcatatttctattaaaagggttggactgtccaaattgttctgcaaaaattgaaaaagaagtcggagagttggatggagtgcaatcctcagtggtaaatctgatgaagcagacgcttacaatcaatgttactcagacagccgcagatacgatagccagtcagattgaaacgattgttcatagtcatgagcccgatgtggaagttcaggaaaaaaccgttatgaatgttacaaagagttattcgttaaaaggattggactgtccaaattgttccgcaaaaattgaaaaagaagtcggagagttggatggagtgcaatcctcagtggtaaatctgatgaagcagacgcttacaatcaatgttgctcagacagccgcagatacgatagtcagtcagattgaaacgattgttcatagccatgagccagatgtggaagtttctgaaattgtacaggaatcttatataccggaaaaaaagcaggaggccaatgaatcctataacaatgaggataagaagttgacagttcgtttagcgactggtgcagcaatctatgccattggtatggcattgactgtttttgcgaaagtgccactgcctatcgagttaacttttctcattgtttcttatgttattcttggtggagatgttgtatggcaggctgtgaggaacatttcaaaggggcgtgtatttgatgaacattttttgatgagtgtttctacgattggggcttttgtcattggtgaatatccagaagcagttgctgttatgttattctatcaggtaggtgaattttttcagtcattggctgttaagcgttccagaaaatctatatcagacttaatggatatacgtccagattctgctacagtaagaagaaatggggaattgattaccatatctccagaaagtgttgccattggtgagattattattgtaaagcctggtgaaaaaattccattagacggtgtggtattggatggagattctatgctggatacgagggctttaactggagaatcggttccgagaagcgttcataaaggagacgaagcactttccggttgtatgaatcagacgggggttttaacgattaagacaacgaaagcatttggtgaatccactgtttcaaagattattgatcttgtggagaatgcgtccagtagaaaagcactaacagaaaatttcattactacatttgcacgttattatacacctgtggttgtaatcttagcagctattctggcgattctgccaccgatccttcttggtggaggttggacagagtggattcgcagaggatttgttttccttgtggtatcttgcccatgtgcattggtcatttcaatcccgctgactttcttcggaggtattggtgcggcatctaaacgaggtgttcttgtaaaaggaagtaattatttagaggcgcttaataatgtcagcgttattgtgttcgataaaaccggaacacttacaaaaggtgttttcaatgtgacggatattttgcctgcaaatggattttcaaaagaacaggttctggagtatgcggcagaggcagagagtttttctaaccatcctattgcaaaatccattcttgctgcttatggaaaagaaatggatcagtcagtgatttctgattataaggaaatttcaggatatggaatcagtgtaatggcaggggaaaagaaagtttttgctggcaatacgaaacttatggatacagaatgtatagagtacacaacctgtgaaaaaacaggtacaaaagtttatttggctgtagatggtcaatatgcaggatgtattttgataacagatgaagtgaagccggacagtaaaaaagcaatttctgacctgaaacatatcggcgtggaaaaaacagtcatgcttactggtgatgatgaaaaaattgggaagtctgttgcagaagaattgcagttggatgaatattatgcacagctgcttcctgaccaaaaagtggaaaaggttgagcttttagatggtaaaaagagaccgggaagcaaattggcttttgttggtgatggtatcaatgacgctcctgtccttgcccgtgcagatgttggtattgcaatgggtgggcttggttcggatgcggccattgaagcagcagatgtagttctgatgacagatgaaccgtctaagctggtggacgcgattgaagtagcaaaagcgacaaaacagattgtcatgcagaatatagtgattgctcttgggattaagagtgtgttcctgattcttggcgctcttggtattgcgggaatgtgggaagctgtatttggtgatgtaggcgttaccataattgctgttttaaacgcaatgagaattttgaaaaaataggaaatgaggtgggaatgtgaaacgaaaactgattctgttagttgttacgattgtttttcttgtaggatttggtgccattttacattcaccgccttctatgattgatgcagtcacaggagcaacaccgaagtcaaaaaaggcggctcaagcctccgcacagttggaaggctcttatgttctcggtattaatatgatgtcagatggtctcgacaacgagaacacccggaataaattaaaagaattggcactggacgattcggaaacaaatgaaacagatctcatgaaaacggacattagttttcggttatatgtatctgagacggattatccgcttgtcagttatgctaagaaactctgtgacaggttgaaacaggccggtttctccgtagatctgaaagggtacagtaacacaatgatgctatcaagagtggtaagtggaaagtatgatgtattcctggcatcggatgattttattgacgttacaacgctaacacagatggactatatgatcatggacagcgaagaaatgaggtgagcgggaatttatgagaaaatggaatacgattttgtctgttttaatgcttctcatttttatgattcatggaatcatgggcagctttatgctgaacggagttggaagtagtgcagggaaacttcttgcatggattggtgttggtattcttgttgtgcatacggtgattggtgtcatcctgacagttcagagtttacagacagcgaagcaatcgggaaaaatgtatctgaaacaaaacgtcatattttgggcgagacgagccagtgggatggcaatactgattctgctgttattccatattggcttgtttggaaaggtgcagaatgggacatatattttgttcccttttacaactgtaaagatggtaactcagcttttgttcgtagcggcaatctttgttcatatttttatcaatatccgcccattgctcgtatcactgggaatcatcagttataaagaacgaaggagtgatatttatttgatcctttcggtgcttcttctttttatagcgggagcggttattttatattatattgggtggcaatatctatgagtaagacaattattattataggtgctggactggcaggactttcagcggctttgcaggcagcggaaaatggatgcaatgtaaaactggtttcctcccttccgtcagagcgggcacagtctgttatggcggagggcggtatcaacgcagctttgaatacaaaagatgaaaacgacagtcccgaagaacattttacagatacaataaaggcagcatgtggtctggcagatccaaatgcagtttggggaatgacacaggcagcaccggagctggtgcactggctgctaaaacttggagttaaatttaacatgagtggctatgatgatgtggatctgcggaattttggcgggcagaaaaagaaacggacggcttttgcacagagcgatactgggaagcagatcatgacagctatgatagacgctgttcgcaggaaagaagcatctggtatggtagaacggttcagccatcattctttcctaacacttcgtctgtgtggcaatatttgttgtggctgcgtaatcagggatgaatacagtcaggagactgtggaattaccgggggatgcggttattgttgccaccggtggtatgcacggattgtttggaaatacaacgggttcgctgagcaatacaggagaagtcaccgcagaattgttccggcttggtgttcctctggcaaatggtgagatgatccagtatcatccgacaactgtgaaatgtggtggaaaacgcatgctcatcagcgaggcggccagaggggaaggtggcaggttgtttgccatgaaagatggaaaacaatggtatttcatggaggaaaaatacccggagcttggaaatctgatgccacgagatattaccgccagagagatatggaaggtcagccatgaatcagaggtatttcttgacatgacggaaatatcggaggagattatttcaaataagctatctggtctggtagacgattgtatgacctatctgcataaagatatacgaaaggaaccggtgtctgttttaccgggaattcactattttatgggaggcattctggtggatgagcagcacagaacgccgattcagaatctttgcgctgccggagaatgctgtgcccaatatcatggtgccaaccgtcttggtggaaattctctgttaggagcgttatacggaggacgtgttgcggcaaaatcagcatgcgaacaggcagatgtagtagatctatcttgtgcgacacagatagattttccaccagcgtctcaaatttcagaaataaagcaattaaacaaagtgatgcaggagactatgggagttgtcagaaatgagaatacgttgttaaatgggattaaaacggtacaagcgctgacaggaaatcttccattgcttggcatggcagttctaaagagtgctcttgcaagaaaagaaagccgtggtgcacactggcgggaggattatccgaagagcaatgacgatgattatcttaaaacaacggtagccagatttgatggaaagcagatacagatttcctttgtacctgttccagaaaggcggtgattcacttggtatataaaataagaatcaggcggcaggagagtcagaaatcagacagttattggcaggaatttgagtatgacggaagcaaaaacagctctgttgccactgttctaaaggaattgaacagtagaacccctttgaaagataactcaggaaatatagttactcccatcagctgggaatgtagctgcatggtgcgaaaatgtggggcttgcgccatgctgattaacgaacgtccgaggctggcatgctctacatttctacatacgttaaaaggttctacaatcaccttggaacctttaagcaaatttccgcttgtaagagatttgatcgttgaccggtcaattctgtttgaaaatttgaaaaaactgaacctttggcttgaaagtgaagcttatatgaatccgtggacacatgaaccgagataccagtcggcacgctgtctgatgtgtggctgctgccttgaagtgtgtcctaacttctctgcaaatgggactttcgcaggcgctgttgctgcagtcaacgcatttcggattctgaatgaagaacaggaaagcactcatttgaatgagatttctgctaaatataagaagaaatattttgagggatgcgggaagtcgttatcttgtcatgatatttgtccgattggtctgcctgtggaagaactgcttgtaaggtcgaatgcagcggctgtttggggcagataaaatggatgatacaataggaatattaagcattattatcattgtaatacaactggtatttttaataggctctattttcccgacggaaaagtcattaaaaaacaatttcaatgaggatggaacaaggcgataacttcttgtttgaaaaattgagaaaacgtaatattgaacaaaaaagaaatgcacagttcttagcttatcgtgaactgtgcatttttgtaaataaatacttttaattagtcgattacggcatcctctgctgtaaaatgttccagagaattttcttttacctgaatgcagatataagtaattccagaaatatcggatgcaaaaaactgacgctttgcagcaggtgcgatttttagccagtctccagttgaaaggctaatttcttctccatcaattatggctttgccgttacctgaaagaattccatagatttcttcattttctttatgagaatgaacaaatgggacatttgctcctgcaggtagttcgtttaaactgatttctgcacctgttaaagacaacttttcatgcagctcaattcggttttcctttccaatagttgtttttgtgtaatttgccataataatacctccatagttaacacttgtaatagaaagtattttggctaagatgtgaaaaatgatgaaggaaaaacaactcgaaagcagtttgaagttgattttgtggtcaatcaggggagtcagagatattatattcaggtggcttatgatatggcctctgaggaaaagcagaagcaggaatttaattcatttagaaatatccctgattcatttaaaaagatcgtggtagtaaacggaacaaaaaagccttggagaaatgaggaaggctttgtaatcatgggaatgaagtattttctgcttaatgctgatagtttggagttttagaaatattgctgggatatcgccaacgaagtaatgaaaaatagtgaaaaaatagtgtaattttagtggaaaaacaattcgcaaaacgatataatatatggatgaaatggaggtggaacatgtgattaaagttactctgacaaatgaaattttaaaaagaatatcggaaatagacgaaaaacgtttttcacttagttcgatagaaatgccacctgttacaaaaaacaggctaagaaaaaactccaagaaaaaaagctcctatgcttctaataagattgaaggaaatccattgactgaaaaacaggcaaatgaagctattgatagtgatccgcacaaacattttttaaagccggaacaggaagtgcgaaattactttttggccttaaatgttttagaagaaaagctgaaaaagaaggaacgtttttcaaaagaaatgattttagaagttcaggcaatggttgaaaaaggtgcttcaaaagaaaagataggcctaagaggtcctatgccaccagggatgctatttgcagtatatgattccgagacaggcgcagcggaatatattccgccagagtacattgatattccggatttactggaagagcttgttgaatatgtaaatactacagatgatcatccgctgattatcgctgctatagttcattatcaattggttaccattcatccttttgaagatggaaatggaagaaccgccagattaatgtcaggatatatccttgattattatggatatggttttaatggaataggttctttggaagaatattttgcctatgacccagatgagtattatgcatcactgcaaatgggattaccggcattgtattattccggacgagaaaatcctcctcatccggaaatttggatcaattattttttaagaatgatggtattgtattctaaaaaagtatacgaattatcaaaagaatccgagaacgatgagttagatggaagcctgtcctacttaaatgcaaaagaaaaggaattcttagcctttctgttaaaaaagcgattatatgagtttacaccaattgaagtaagcaaaatgcttggtgtaaccaacaaaactattattaatagatgtgcaaagctggtaaataatggtttgttaattccaatcattgtcaagacacggatccgatcctatcggttaagtgatttttctaagacaaatgagaaaaagattttgaaaaaaatatcataatagatgcatgagatgtacaaagacatatgataaagaaaataagaaaccggtagtccatcagtatctttcccgtgtaaaggattggctttgtttgattgatgcccacatcgtgggtgaactctttttcctttttcataatagtatcattatggtataatagagacatcaaaatcggcatttgcatttgtgggatgctttgggttttacgctggaaaacccgatatggaaattgtaaggaaaaagcctgaaggttttacgattatggttcctcaaaataaagagcctcttgttatataaattttcaagtgatatactgaacacatgaaaaagaaccgtgcgatattacagtcttgcattgcgcacggttttttataaatacgtggttagacgaaactaacacacgtgtgatttacagaacaatctaaaagaggattaatttttatgagaatattgatttatggtgcaggcgtgattggaggaaaaagcatgaaaaacgaagaatacaaaaagttgtcgattgctgaatttacaaaagcagcaggaagatatgaaagtaaccatgctggcatatatgaaatgtgcaagaaggattatcctgatattctggcggagctggagaaagagccgtttagagaattgctggatgcaggatgtggtccggctccaatgatttctttattatcagaaaaatatccagacagacattataccggactggatctgactcctgcaatgatcgaacaggcaaaaaagaaagatattccaaatgcaacatttgtggtaggagactgtgagaattttccttttgaaaatgattcatttgatgcaattatttgttctatgagtttccatcattatccggatccacaggcattttttgacagcgtaaaaagatgccttcgcccaaatggaagattgattctgcgtgatgtgaccagtgacaataaagtattggtatggctgatgaatacactggaaatgcctctggcaaatatatgtggacacggagatgtccgggttccaacaagagatgtggttatgaaatgttgcagaagagcagggttaaaagtagaaaaatttgaaatccgtaaaggcatgaggatgcattgcgttgtaagaaaacaatagtggaaggcgacagataatgaaagaaaaagtaaatgtgacaggcgtaccggaaacgatggtacagactttgtatgcaagagcaaaagaaacaaaaaagcaaaatgcaaagatcaaagatgagatcgcagtaaaactagtggaaaagcttgattatgacttttccaaggcggataaggataatgccatgacttatggtgtgattgcaagaacaattgtattagaccggatggttgagcaatatttgaagaagcatgaaaatgcagttgttataaatcttgcatgtggactggataccagatgttaccgtatgaagggaaaatatctgcgctggtacaatgtcgatttgccggagactatgaagataaggcggcagtttcttccggaaacgggtccgatataccagattgcaaagtctgcaatggatgattcctacgtggacgatatcgattatcatggagaaaatgttctggtgataattgaaggacttaccatgtatttgtgtgagaaggacatcagaaagatattttctattattgaaagatcatttcagaaagtaaacgtaatggttgaaaccatgtcaccatttgttgtaaaacatgtgaaagaaaaatctatagagggcagcaatgcaaaatttacatggggtgttaagaacggaactgaactacaaaagattgtaccgaatttttctatcctgcatgaggtcagtctggttgagggaatgaaagaacttatgcctgtttattgtgtaataggcaaaattccagctgttcggaatatttcgaacaaaataatagttttgaagaaacgcggctgatattaaggagaggatacagatgcagaaaaagcattttgaaatggaaacagatggattttatggcacatactggaaatgcaaatcggattcagactgtgcgatgatcgccatgatcggggatgattcagaggattatctggcgcgcacatctgtgaaatggttacataaactcggtgtgaatgtgatgacgatgtcaccggcgaaaaaggattatggacatcataattatccgctggaacgcatacagaaagcaattcgctggttaaaagcacatggtaatcagaagataggaattgtcggggcatctactacaggaacacttgccttaactgccgcttcttattttaaagatcttacattgacgattggcctgacaccgagtgactttatctggcaggggtttatgcagggcaaaaaagatgggtgtaaggaatggccgattgagggcgaatcacttttctcttacaaaggagaacctcttccgtatatgccgttttgttataaacatccagattactggcatgtgattaatgaagaaacaaagcggaccggtgatatgctgaattcgagaaaactgtttgatgattcagaagcagctcatccaattacagaagaagaaatgatcaagattgaaaaaattcatgggacattattgctaattggcgctgaagatgatgtgttgtgggatactgcaaaatatatacgccgtatggagcagcgtatgaaagagcgtccccacacatgcaggttggagtctgttatttacgagcatgggacccatttcgtttttccggagagtatgttaaagacgatgctgccaattggttctggaatctttatgaaactggcatttcaggcggcaagaaagtatccgaaagaatgtcagagagcacgtctggatattgaccagcgggtgagaaatgctgttgctgaatggaagagtgcagaaagatagattaaaatagatagaaggtgtaggtatggtatttaaaacaataggaaataaatcaaatcctgtcatcttgtttttccatgcaatgggagtaattggggaaagtggtatgccggttgcagagaaaatgaaagaaaaatattactgtattatgccaacatcaaccgtgtattgccctggacagagatatcaaagtaaaagagatgagatacagcaaattgtacgatttctggaaaatcatggaatcaaagagatagaacttgcagttgcatcttcgattggtgcagatcttgccatagcattcctgacagagacaaaaataacggtaaagcatgttttttttgatggcggacagtttgcccagattagaaaagcaactcgcagaatcatggtcccgttcttatatatagtaacgaaaagtttatattggtcaaaaggaaagacactaaagagaatcatgtggtgtgacgatgacaaaattaaaccctattttatagaggcagggaagaacttgacatatgggaatctgagaagacagctggcagacagcttggaagataaaccatttccagaactgtcagaagaattgcagaaacatacattttgggaatttggaagtatagaagaacattttaaatacagaaatgcagtgatgcagacatatatacacggtaatttcccggtttttgagggatttaaccatatgcagtatcaaattcgcgactcggaagggtttgccagaatgctggaaacgattattgagacaggaagattacccaacccggttgttaagaagggggggagaaatggatattaaaataaccccaaccgcaagggataattcacccaaagacaagccaagattattgcgttaagataaagaaaatggatagtttacttgactttgcaagctatccattttattacatcatataaaagtacttccaccggggacgacaacacagcatggccatttgtagtggttatgtttgcaggagtttctcgaaactacttcgttgtacttagtatactgtttgctaatagtatatgcaagatgtcactttcaaaaacacaaatttttttattttttgaaagtggaaactatgtaaaggagtgtctttgtctgattgacacacacctcgtgggtgagcttttttcctttttcataatatgatattaccttcggctcaaatgaaaaagtatggtggaagggattcattccggatagcaaaaacggaagccttttagcttgaaaatggaataagtcattcactaagcctttatttctgatgaaagcgcctttagcaggtcacggaaaaaggaaatataaattcaaaataactcaaaaacttgacttataacattgactaagttaaaataaaacaaattgagttaaaaggagaatgagaaatatgcttacaagcgtattcgggatttctataaaatgtgaagcatggaatcatcaggattctttgcctgtttatattgcagggagttatgattttcatacagcatatattggaaacagacgctgtataatgcttgctccaacagaagaacttgccacacttccggcattgaaaaaacaaattgtaaaaatacagcagattgataatgtgccagtcgtatttgaacttacaacggtatcaaattatcgaagaaaaagccttatagaaaataatataccgtttattactaataagcaggtctttcttcctttcattgggacaatgctttctgatgaaaaagaaccccaaaagctgactggtaagtttgtttactccacacagcagttgtttttattttatctgtacagtaagaaaaaacgattgtatacttcagaagccggaaaagtgcttccgtttacagcaatgaccttgaccagagcagtgaagcagttggaaacgacagatttgtttcttgtagcaaaagacggtgttaataagtttattgagtcaaaatataagcgagatgaattatttgaaaaagcaaaagtatatttgacgactcctgttcgaaaaacaggatatatagataagacgcaagttacagaaaatatggtctttgcaggggaaacggcactttctgaaaaatcaatgctaaatccaagccgagttgttacctatgcaattagtgagaaagattatgataaagccttgctgactgatgaattgatagacccggataaacaggtcagacttgaattatgggcatacaacccaaaacaattttcagaggataacagtgctgatgatatttcacttgttttatcttttacagatacaaatgatgaaagaattgaagaagcagtagatgaattgaaggaaagaaggttgcatgagtaatggtcagtggatttacaaaatttaaggaaagatttcaaggttttgaaaatcaatatgtcatcatcggtgggacagcgtgtgatttgattatggaaaacgaagaactaccatttcgtgctacaaaagatgtagatattgtattgattgttgaatccataacagcggagtttggcaggcagttttgggagtatgtcaaatagaaacgttcgacaaattttttacgaaatcagtagattgtctctttaaaaaagaactcccgagtgctaagatagacaaggcataaattgtaactgtgaaggtactgaacagttacaataaattacctatggaggaaatataaagtgacagaagaaattgagacacaagagaacaataaattaccggttctgcggggcgagctggcgttgctggtggtggtattgatcaacagcctgggagttgtgctgatgctgtattccggttccgggatctcggcgatttccagtgtaccatatgcattttcggaagtattcaataagatctcccttggaacctggacctacattttccagggacttctggtgttatcactgatgatcatgcgtaagaaattcgttgcaccttatcttttcagttttgtcgttggatttgcattcagcgagatgctcgatgtgcatgaaatgtggataggtgtcctgccgacagccattggctacagggtactttattttatcatcagctacctgctcctgtgcatcgggatcgcactttccaaccgctgcggtcttccgatcatcccgacagacctgtttccgagagaactggcagatatcacaaaggtaaaatattccaggatcaaaatcggctatgacgttacctgccttaccataacagctctgatgacttgcatcatcctcggacatctggacggacttggaatcggtacgatccttgccgcatttaccatgggaaaagtgatcggcatgatcggtgacaagatggatcagcatgtgagatttgagtcgtttatgacaaaaagagtctgatggatttcgagacagacaacgcaataaaagaataaaaaccacaaaataaggatataaaaaccgacaggtattcgctacaatagaagtagaaaatgcaggtcgttttttttatataggaaaggaacataagcagcagttgtatagattgttgttatgatcatggttggagcgaattctgttttgactacaaaagtgattcgcgaaaacacaagaaagagatttacagaagtggcagtcgctgtggaagaaatcggaaacagcatgacgcttactctgaaagcattagcggaaggcaaacaggatatcgagcacctggcatcggaagttgaagcttctgttgataatggaaccgaggttacagaaaaactggaaaaggcattaataagcattatacggtcaatttaatatcgacatatgaccatatttgcgttataatgaaatcaaatctaataagaaaaccagataatcattactggatttgtaaaatacaatggtggcagattatgcacctgaaagaacagtataacaaaacccttatggtggatatagggtggatttccacccaaagcagattttttcaggataaaacaggttttcttatctttacagattcttacatcaaagtcagtaaattcaaggctttgaatgnnnnnnnnnnccccttatggtggatatagggtggatttccacccaaaccagattttttcaggataaaacaggttttcttatctttacagattcttacatcaaagtcagtaaattcaaggctttgaatgactttaaataaaatttaatgacaatggtttcaggcagaagaggaacctcctaagcgctagttgggggttcgattccccctgagaacagttgtttgaagcagtaatgattaagaaaattcattactgnnnnnnnnnncatttttgggtggaaaaatccaccgaaaatcattaaaaaaatgattatttcatccacccaaaattaaaaatttccacccaaatgagaggaaatgatgaaaaagttgtggagatagaaattgagagacttcacgattttaaaaatcatccatttaaagttcaggctgacagtcagatgaaggagctgcaggacagcatcagtaaatatggaatactaaatccattaattgtcagaccaaggccggaaggattttacgaggttatatcaggacaccgaagaaagtatgcagctatggagcttaaatacacaaaggtacttgtaataaaataatcagatacatgctggatgaggaagcaataaatgttatcgcataggcatatttactatgatataatgtggctatgtgagaaaaattattatttagaacttatttgcttatatgataagcagaatggaggctttgcgagatgaaagtaatcattataaatggaagtgcaagaaaaggaaacactcttacagcgattgaggcttttgtaaaaggagcatctgaaaaaaatgaaattgaaatcattgaacctgacaaacttaacatcgcaccatgcaagggatgtggtgtctgtcaatgctctaagggatgcgttgataaggatgatacgaaccctacaattgataaaattgctgctgcagatatgattctttttgctacaccagtttattggtggggaatgtcagcacaattgaaacttatcattgataagtgctattgtcgtggattgcagttgaaaaataaaaaggttggcacgattgttgtaggtggttctcctgtagacagtatccagtatgagctgattgataagcagtttgattgtatggctaaatatctttcatggaatttgcttttccagaaatcatattatgctacagcaaaggatgagctttctaaaaatcaggatgctatgaaagagcttgaggatattggaaaagaactataaagcttgcactgaaaatcaaggttgaagaaatggaaaattgaaatttgtgagggataaaaatgctattattgacacttaatatgaatatgttcaattttgttattgatgatagttttaatgattattttgactctatttccactgatatagcatttattcaagagtgtagatataataggattaatgaacaatattatgcaaaatgggcgggaaattatgaagaacctattgatagacgatttcatttatcagtagcaattagtaaagatgagaatatttcaaagtctaataatgatttgaaagctgattacacgtgtatattcgtaaaatatgcactaaaaaggaacctgcataaaaacagattccttaaatgagggaaaatccctgtcgaagaatggcagtccagttacttttctgatagagaaatctgactatgattacagtctgcttttcttcatcaatcgtataaaaggcaaggtaattattgattattacaaaacgaatgccccagcttgccagtaccggatcatctaccagatgaaacttctgtggcaggtcggctagtgagcctatctgctcagtcgcagcatctaacagattatctgcggcattcggatttttgagggtaaattcgatgtaatccgcagcacgcataatatcgtgttctgcggtggaagtgatatgaacctgatagctcatcgactgcggcggctcctgatatcagccatagcttcggaaaatggtctggtgttacctgtggcaatatcgtccattccttccttgatctggctgtaaagttcaaagcggctggtcagtccttcgtaggcttcaatgctcataacggcaaggtcgccttttccattcttcgtgatgaaaactggttcaggataattatgacaaaatgtagaaatttcattgtaattattccttaaatcagcacttgatttgattgctggcataaaaacacctccttatttgataacaaaattatacacaaattttgttatggagtcaatggatataccattagtgttagcaggataaacacaactattcatatgtatctgaccgcaaggtcgggaacacagcccgcagggtgaagttcccggcgggctttcattataagaaagcgaggttagagacatgggtttatttacagacggatttaagttactgaaaaaggcgagtgagcctttgtataagacacctaaatccattcaggaaaccatagagattatggcggtggctgaaaacggcatttttgaagtaagcaaaaataagtattccaaatgtacacatagaaattatcctatgattgaacttaagcaatacattgataatatagttttgaattcaaatatgttttttccgtagcagtgccaattatgagagaaatcaatacaaatatcagaagattatcggcacacactactataatgacatatgaggaattggtaaatacacgtcaaaggatattgggaataggataccttaatttattctatcaacttttagacaaaaggtagattgacaaatgctattgatgtacagtacatgaatggcatacatggaatagatagagaaggaatattgatatgggcatattaggaaatatactttggtttatatgtggtggattgttgagtggactgtcgtgggttttggcaggttgcttgtggtgcatttctataataggaatacctatggcggttggaaatgctgtggcaggtctgatatgttgtataacaattatcggaattccttttggaaagcagtttttcaaaatcgcaaaattgtctctgatgccatttggggcggatgtggtgtagatggtgcgattcacagagcagcgggaccggaacttctgacagagtgcaggacacttcacggatgtgagactggaggagcaaagataacaaaagcctataatctgccatgtgattatgtgatacatactgtgggaccgatatggaatggtggaaggaatagagaagaggagcttctttctaactgctattttaattctatgaagctggctagggataatggaatcaggtctattgcatttccttccatatcaacgggagcatatagttttccggtggtgcttgcggcaaagattgcggtacgtacagttgccagatttctgcatgagaatccggacagcttcgatttggtggaatgggtgctgtttgatactcagactgaatcggtgtacgaagcagaagttacgctctattataatatacgaatttagtttatttgaatcaaagcaaaaagctcaaaaaggagagattattcatggttttattggttgtagatgcacagaatggtatcgtggatgaacgcttatatgagttcagaaagtttgttggtaatatcaaaaagctgattggagcagctcgagaacaaggtatagaagttatttatgtacagcatgatgatggacctggtactggattctctatcggggatgatgagtttgaggtctattccgagtttcaaccgatgcctgatgaaaaacggtttatcaagtccgtatgcagtgcgttcaaaaaagagagtggtctgcttgagtatctgattgcaaaggaagaaaaagacgtgatgatttgtggcattatgactgatttctgtatcaatgccacggtagaggctggttttgagcatggcttacacatgatnnnnnnnnnntaaaatgtaccctatagattggacagattgagtttttaaaacccttaccattagacagtaagttttaatgaaaacccttaaatctatacaatgagtttacagggaacccttaacttcggacatggttttgatgaaccccttcattttggacaaaatcgctttttgactccgattcagattgatattacaataataatgaattggaggaaattatggcaaacagaaagtttacagaacaggaaatgctcacactgagaaatagcaaatatgtgctggatgtatcaccgagcattgtacatttctcggcagaatttaaaaaactgttttgggaggaactgtcaaagggcaggcttccacgtgagattatttcgactcttgggatagatccaaatatcctgggggattccagaataaatggtctgaaaaccatgattggaaatgaagtaaaaaagggaaatggttttcgagatcttaacacctatgcacagggctgcaacggatatctttcggctgaaaatcggataaaatatttagaaatgcaactggcatataaagatcaggagattgagtttctaaaaaaaattgtatctttaaatccggaggctccggaataatgaaaataccagcccatgcaaagtatcagattatttatgataccatgcaaaaaaacgataatctattgaatgtagctgccatgtgcgaaattgcaggagtatcccgttcgggatattaccattatctctcaacagaggaccagcgaatggaaagggaggaacaggacagacaggattttcttctgattctgaaagcataccagtaccgaggatatcataaaggtgcccgtagcatatatatgaggctgttacacatggaaccgccgatagtgatgaatatcaaaaaaatccggcggttgatgaagaagtacaacttacagtgccctatccgcaaggcaaatccctatcggagaatggcaaaagcaatggcaactgcatataccgcacccaatatagtaaaccgtgaattcgaggaacacggaccaagaaaaattctgttaacggatatcacgtatattataaatggaaaagcaccccggtgctatatgtcgacaattatagatgcctgtaccaaggaactgctgtcatgggttctcagcgaatccctagaaattggttttgtattagaaacagtaaagcagttaatagaaaaacatggaactgatttaagcacagaaacattaatacatagcgatcagggttcccactataccagcattaaatttatccaattgttaaaggataacgaactgagacagtctatgtcacgtagagcaaactgttgggacaatgctcctcaggaatcattctttggtcatatgaaagatgaattagatctatcagagtgccacggctatgaggagatattaaacgcagttagggattggacagaatattataatacagaacgttatcaatgggacttagcaaggttgtcacctgttgaatattatcaatatctgacaacaggaatttatccactgataatccctaaagcaaaaggtaaaaacgatcaatcagaggcatcactttgatgcctctacacaacaaacaaatataaaatagaaatctgaaaaggaaaagtcatagtgtccttgacaaagggtacactttatttaaccactgtccatattccggatcctgatcctctgacggtgaccatacggtcagtgtacaggtgatcggttcttcctcctgtgcatcctgctcggttgcttcaccctgttctgtttcagaaacagatgcatttgctgatgcagtgttctcttttgcatcacttcctccgcatgcggtcatggatactaccatagctgcacataacattacacttaatactttacgtttcataccttttcctcctgtttttcgttccgaaatattttcgttttgtttcgctatgaatcatagcattttgagatatcatgtcaatatataattcattttgtatatattatttttcttattgcgtttttctttgtacaatgttatgatattttctgcgaaacatttaagaaacattttgtaaaacactctgtttcgccagaagggagttttcatatttatgaaaaaaataaattttcacacacacaccaaccgttgccgccacgcagacgggattgcagccgattatgtccagtctgcactgtctgccggtgttacacagctcggtttttccgaccacgccccatttcccgattatgattttggaatgagaatgccttactgtgaattatctgaatatatcgaggatataaatgcattgacggtacaataccggactgatataattttatggaaaggattagaaatcgaatatctcccagaataccgggattactatgaagcacttctcacccgttccgggatggattatctgcttatgggagaacatttctataaaaatgcatctggaaaaaccacgaattataccgatgcactttctacagacgaatttcctgtctacgcacaaaatgttgctgacggaatgaaaaccggactatttttggcagtcgcacatcctgatatttatatggctgataattttgtctgggatgacaactgtaaaaaagcggctgacattatcattgatacggctgtcactaccggcacagtgttagaatacaatgccaacggcttccggcgcgaaaaaaagttttatccagacggaaccagatatcagtatccgcaccctgctttctgggaaatggtcaaaggcagcggtgcccgcgtgatcgttggttcggactgccacaatccatcacaggtctgggatgtagcaattgaaaaagcatatcaaaatttatatgcacttggaatccatccgataagtagtctctttgatacatctgacgttccatctgtactttgcacaaaatcacacgacgaggaacattcatgaatatcagagatattgccagattggcgaacgtgacaccgggaactgtttccaaagttttaaacaattatcccgatatcagcgaagctacaagacaacacgtactacagatcataaaagagaatcagtacaccacaaaaaacggcggcagaaagttcaaacaggctgttacaccacgtattggacttgtctcggaaaatgtttacaactgggtttccgagacaatgcagaacctgctttccgtgcgctttcacaacgccgactatactgttttatcctttcaggataattatttttcacaaaataaaaatgaaaaatttcaggaattattaacttatatcgaccgacaccagcttacaggtcttatttacttcggtggaaactttgaagatgtccctgccgattcctttgccgcactcaactgccctgttatcttcgtcaatactgtcctaccaccagataacatgatgaccgccacaacttactcaagcgtccaggtcaaccactatgagactgcttactggcagatggaatccctgatcaaaaacggccacagccatatctgtatgctgatttcttctaagatcgataccagtgtgtatcgcctccgctggcaggcatacgaagatgcgctgtcttcccatggtctttccacggaatatcttgcagaaagcggctatcagtgcgaacgtgcttaccgggagctgacagaagttcttactatgcacccagaaatcactgccatctgcagtatttcagatatcgtaacgcctgccgcgatccgtgcaatccatgatcttggaaagattcccggaaaagatgttcatattatcagctttgacggcatgccttccatgcactattgcatcccttccatttctacttttatccagccacgagatgaaatggcaggctatatttatgatttactgcttgggctgattagtgacgagcaccagcaccagcatattacgtttcagacacgtttttcaccgggagagtcttaatgattttcttctcaaatcagaatattgccatatcactttgattgattataaaaaggcagggagaaaagaaaatttttcattttcttctctccctgtaacctcctaagcgctaatttgggggtcgattccccctgagaacagttgtttgaagcagtaatgattaagaaaattcattactgctttttatttttccacccggtattttcaagcattgtgtaatatagggaaatggttgtcaaaatctgtaaaattggttttcttgtctgagaaaatctatggtattgtgtttgttgaataggggtaaatggtggtataatcctattattgatagatagtaataataggtgatttttatggaacgagtggtgaagttttaatgactaaggatgaatggtacaggcagttatttgagcggctggataatgacattaataattggatacatcattatgcttataagcttgctgttgggagtagtattactgtaatagtgttcacatagaggtgtgtattatgggaaacgaatcaggtgaatggattatgcatggcatgaagtgggacaacccggattgcatccattctgtagatgaagcaatcaagtatataaatgaatttggttttttaccattatttaagaatgacatagatgggttttcacttgaagaaagaactgttccagagtactggtggagtgatgatccggagattgatccatggatgtggcgggctattatagcaaggcggcatgatatcgtctatggaaagttctttgataagaaggcaggatttatatcaaaaaagtggcttccggtatttgctaattatcgccgggatggatatgattttgatgcattatatgatgatgggaaagcacctaataagcataaaaagataatggtcaattttatggaagataatgctgattcagagatttattcaaatgaattgaaaaaacaagctggatttggtaaggatggagaaaagggatttgatggtgctataacgaatcttatgatgcagacctatctgtgcaactgcgattttaagaagagagtgaataaaagaggtattgaatatggatgggatgtggcagtatattcatctattgagcatatctatggatacgattatgtgacttcctgttataaggatagtccgcaggattcatggaagcagattgtagattatatgcatgagatgtatccggaggcaacggataagcagataaggaagctgttaaagtaatacaggcatggataaggaggtgccacaatgccatttaagattgttcgcaacgatataacaaaggtaaaagcagatgcaatcgtaaatactgctaatccaaatccgatatgtgtaagtggcacggacttagcaatatatgaggcagcaggaaaagaaaagcttctcgcagaaagagtgaatatcggaaaaattgcaagaggtgacattgctgtcactggtgcatataatctaaatgcaaaatatattattcatacggtaggtccggtatggacggatggattgcaccatgaatttgaaattctggaggactgctatcgtaaatcattgcaaaaagcattagaacttaagtgtgagagtattgcctttccattaatttcgacaggagtatatggatttccgaaagataaagcattacagattgctgtgtcagtattcagccagtttcttaccgaaaatgaaattgaaattatattggtagtatttgataaaaggtcttttcagctttccgttcagattgtaggtgatattgattcctacatagatgctaattatgtcaaggaaagtcatagaaaagaatatccggtgcgaagcagaagcaacacccgtatgagagaattgccagaggaagcgttctatgatgagatgcttccaagagaggcagaagataactatccactggaggaagacacagggttagcagagccttgtatgctgtcagcagacatttctttggaagaccagcttgcaaatattggtgtttcatttcatgataaattatttgagctgatcgacgaatcgcatattgataataaggatgtgtggaaacgggcaaatcttgatagaaaacatttttcaaaaattcaatgtgaccagaattatcatccaaagaagaagactgtgatggcactctgcattgcactgcagcttgatctggaacagtcaagagacttacttgcgagagcagactgggcatttagcccaagtagtaaggtggatctgatcgtgcagaaggctattatagatgagcagtatgatattatgcagctgaatgtgacattatttaagtatacgaatgaaattcttggagtataaattgtttacaagtaaatattgattagtaaatgttacgtcggtactcacatagtatcggcgtttgtttttatcttaaaagtgtcgcccgaacagcgaccatataaagatgctattcaattatacttatattgtaacagagaaagagaggtgccggagtaatccggggattggaggcatatatgtacggagcgattttaggagatattattggaagcccgtttgagtttgacagaggtgataaaacaaagaagtttgatttgtttagtgaaggctgtggctttacagatgattctgttatgacaatagcagttggagaagctctcctggcagtcggaccggaagctgcagtaaagaaaattgaagatgcggtagcatccaatatgcaggattggggaaaaagatatccacatgcaggttatggtggaagcttcagacattggcttaaagaaaataatccgaagccatacggaagctatggaaatggttcagccatgagagtgtcagcggcaggctggctttatgattcaattgaaagaacaagagaggtagcaagagcgacagcaaatgtgacacataatcatccggaaggtataaagggtgcagaagcaacagcaagtgcaatatacatggcaaggaatggctcttcaaaagaagaaatcaaagagtatatagagagggagtttcattatgatctgcgtagaacattggataatatccgaccttactaccatcatgttgaaagctgtcaggaaacggtgccagaagcaattatcgcatttctggaatcaaaggattttgaggacgcagtgcgtaatgcagtatcacttggtggagatacggatacacttggagccattacaggaagtattgcagaagcattttatggaatccctgctgtgctgattgcagagtgtaaaagtcggattgataaggggctgatgacggatgttcttgatgaatttgatcatgtacttggcaggagcatggatacttattcagatgaagtggatgagatacaggcaaatcagatgattgaggcagcaatcgataagtattattagaattaaaggaagaacaaagattcgacaaagattcgatgtgcgagggcagactttgggactcgtaaaatgctaagctatagccatcataagaaacaagcatttaatttacgaaaaacaggaggacaggacaaaatggaaaaatttatttattggataaagaggacactgcatcattcaaaacactgcaacagcttatgtatgctgtgcaggtattatgatgaatgtaaaatcgacggaccggtataatatcaggaggtaatacttatggcaatgtacgactggaaccacaacggaaaaaatgacaggcaggacgattatttagagtatatgatttacaaggactgcactaatgataataattcaaatactaatcacagttcatataacagcgactcagcgtttggcatgaatgtgttcgtagtaattgctgtaatagtcatatttgcatttattggtaatgctatggaagagagtacacccaaatgcataaagccgggatgtaataatgaacagacccaaaacatgctacttgcataagccgtattcaggcggatatacatcatcaggaagcagctcatcaggaaacagttcatcaggcagtagctcatcttattcggataaatcatataatagcagctcaggctctgcaggttcatcatcaaatgcatatggcgatgacaatagcggaagctattcaggcggatcaacaggtagttcatcatatcacagcagctcaagttcttatgattcatatgatgaaggatatgatgatatctatatgaatggtgactatgattatgacaggtacgacagtgatgatgactatgcggctggtgtagatgatgcaatggatgaggattatgaagagtggtaaaaaaagacaggaggacacgacaatgaaagaaatgtattttacaatagcaggatgcaaccattattacggaagtgacttcatggaaaaaggcatgaaggtcaagctggtcaaggagccggacaatgagtatgacaacgaagcaatacaggtaaagataaaaggacttggcaaggtgggctacgtggcaaacagtccatacaccgtgaagggtgagtcaatgagtgcaggcagactgtatgacaaaatcggtggtaaggcaaaaggaaagattgtgtttgtgacagacggcggagtgatttgcaaagtaatcagtgatggtaaggacaagccggtgatgatagaggaagataaagtatatgatgaagatcagttaggttttaaaatatagtttttttcaatgcttaatggtataataaattcatgatgaacgaaaacaaaaccttggaatattacaacaaaaatgcagataattttgcaaaaacaacgatagatgtaaacttttacgagacacagaagcattttcaagaactgttgccggagcacggatatatattggattttggctgtggttcaggaagagatacaaaatattttttggaacagggcttttatgtagatgccacagatggttcagaggaaatgtgtcatatcgcaagcaattacacaggaatacaagtcagaaggctgctatttgaagagcttgacgagaacaaaaaatatgatggcatatgggcctgctcgtcaatacttcatcttcctaagaatgaacttaaagccgtgtttatgaaaatgtttaaagcgttaaaggaagacggcataatctacacatcttttaagtatggtgattttgaaggcgagagaaatggccgctatttcacagatttcacggaaaagacatttgaagagtttgttgatgaaatagataatctgcaactgaaggaagagtggattacaggcgatgtaagaccggggcggggagaagaaaaatggctgaacgtaatactgcagaagaattagatgatgtatatgaaataaaatattcgacagatgcaatgaccggaggcgcggataagatacggattctttaacggagatagtaaatgcactgaaaagtcggtgatttttgcgtcagttgcgactcttggcagagtggaatatctgaatgaaaattactttgcaccggattattttacatatgttgtgattgatgaatttcaccatgctgttaatgaacagtatcagagaattgttgattattttaagccaaaatttctcctgggactcaccgcgactccggagagaatggacggaaaaaatatctatgaaatctgcgattacaatgtgccatatgagatttcactaaaggaagcaatcaacaaaggaatgcttgtgccgtttcattattatggaatctttgatgaaacagattattcaaagctgcatatagtaagaggcagatatgatgaaaaggaattaaatgaaacctatataggcaacgttagcagatatgagctgatttacaaatattattgtaaatacggctcaaggcaggcgcttggtttctgctgttcaagggagcatgcaagggagatggcaaaagaattttcaaaaaggggaataccatctgtagcagtgttcagcgatgcaagcggcgaatacacagaggatagaaatgtagctattaggcagcttaagcagggcaaaatcagagtgattttttcagtggatatgtttaatgaaggtgtggatatcacatcagttgatatggtaatgttcctcaggcctacggaatctccgatagtttttctccagcagcttggaagaggactccgtaaatgcagaggaaaagagtttctgactgtacttgattttatcggcaattatgagaaggcgggcagagtgcgttttcttctgtcagacaggagtaatcagcatgcaggtgtgtataatccgtcagatacatcagcttttccggatgattgtctggtagattttgatatgaagctgattgatctttttgcggaaatggacagaaaacatttaaagcttaaagaccagataattaatgaatatttcagggtgaaggaacttctcggaaggcgcccggacagaatggatttgttcacatatatggatgatggaatttatgaaatagccattgctcattcaaaggataatccatttaagaaatatctcgaatttcttaaagaactggatgagcttaatcaggatgaagaggttttttacaaaggaataggaagagaatttatcagtctgcttgaaaacaccagcatgtcaaaggtatataaaatgccggtgcttatggctttttataatcatggaaatatcctgatggaggtgtcggaagagcagctgctttcaagctggaaggagttcttttcaaccggaaccaactggaaagatctcgataaaaatatgactattcaaaaatacaattccatatcggatgaggaacatttaaagaagattctatcgatgccggtgcatttccttttggagtcgggaaagggattttttgtgaaaaaagatggtgtggcaattggacttagagaagagctgagaccgctaattgataatccggtggtggtttgtcagatgaaggatgtgattgattatagggctatggactattatcagaggagatataggcagtcacaggaagattgagacaagtgctgtaatccatggaataatttatgtttaaacatttagggagtgtgtgattatgagaaataacagaaattctatcatagaaaatgtaattttgtttctggtagctattggagtatttgctatcataggtggattcgcaggatggtggtctggttctgacgatgaagagtattatgattatgactattcaccatcaagttcatactcgtcacatagcagttcatcgtataattcaagcggcagctcaggaagcagcagttatacaccaaagagctattcttccggaaaatataatagtagtagttcatcagaaagcagtacaaattcttcaggcagcagtacggacagctatagcaattccgatagtagctctacatattcaggaagctcttcaagcagcagctccggttcaaagaagtattatcatgattcatacgatgatggttatgatgatgtctatatggatggagactatgatgatgacagatacgacagcgatgatgattatgcagccggtgtagatgatgctattgatgacgatgacgaggactggtaaaatagttagaggtgtactgatatgccataggatggatatggtggagatgaaagctttccgcatgatggaaaacagggaagatgcggctgtggcgagggctacagttgggatgataatgatggcaaagtcaaaagaaggtggtcagagtgagactatttaagaaaaagacagttacaaaggcatatgataaagaaaataagaaaccggtaatcaaagcgagcatatgtaatggtgagcaggttgcaggctttaagaacattcatacaggtaagatagaagaagttatgctgattaagaaccaagcagaccttgatgcattcaagaaaatgtatggaatagatggagagatagagaaggaatattaaacgaggtatttgaagttatgttatcttttacttctacaagaatataaggattatatttatatttacttttacacttaaatataataaaatttaagcacaaaagtaaatatcaaggataaggaggccaactatgtcaacatcaggtattttggaatcgctaattgaaaaagacaatggatatttgattacatcgaaggccgttgaatcaggtgtatcaaagccatctgtctcaaaatatgtcagagagcatgacatggaaaaagtggcacatggcatttatattttagatgatgtatggccagatgagctgtttgtactccagcaacgaaataagaatattatttattcgggcgagaccgccctttatttgcatggtcttatcgacagagaatacagtcatatttgtttcactgttcctaccggatataatgctacacatatcaaaaagaaaaacaaagaagttcgttatgcaaacccagagattcttgatatggggacctgtgaaatcccgtcaagcagcgggaatttggttaaagtatatgacaaggaaagatgtatttgtgatttgattaaagatcgaaagaaatatgaaattcagttatatcagacagcaatcaaggaatatatgtcctcgaaggaaaagaatctatcaagattgattgagtatgcggttaaacttggagtaagggatgaagtgatgatgtatgtggaggtaatggtatgattcatacagcgaaacaacttaaagacaaagtaaaaaacatgtccggcgggaatagtgaagttgcgcaagcactaattagaacatattttatggaaaggttcttagaaagagtttctgtttctgaatacaggaataattttattttgaaaggcggaatgcttgttgcttctattgttggtgtagacatgagagctacaatggatatcgataccactgtgaaagcattaccccttaatgagaaggatgctagagcaatcattgagagaatcggtgagcttcagcttgaagatggggtaaactttaagattacatcagtaaaagaaatcatggaagaatttgattatcctggcattaggatgatgatagaagctaatctggaacgaatgagacaaccttttaagatcgatatttctacggatgatgcaatcacgccaagtgcagtggagtataaatacaagcttatgtttgaagacagatcaatttcagttttgtcgtataatcttgaaactcttcttgcggaaaagatgcagacgattttggcaagaggacttgcgaataccagaatgagggatttttatgatgtatatgagattatgaattcaaaggctgatcagataagctttgatgttttgaaaaaggcatttgtggctacttgcatgaagcgtgaaacttcttttggtgaggaggaagtgagagaaaccttagacaagattaaagatgattctggactcgaagaaatgtggaatcgttttaagcgtgtaaactattttgttgatgatcttacgtggggagaagtatcggaaacaatagtagaagaaatacctattgtcttagaggattttttattgaagaattttaatatttaagagtttttttttccctttttgacattaaagataagatttcttgtgggtttgtcaattgacgtccgggaagtgtctgctttggtttgcggtcacggtcggcttcgtcaatcgctgcaataaaaaattttacgctgtttggattggatatgacaaaattatgagtaatacttttggaaacagtatagaggatatgtgtaaagctatgtgatagcttgtgaaatggaggtatatttatatgccatacgatggatacggtagagatgagggatttccacatgatggaaaacagggaagatgcggctgtggcgagggctacagctgggatgataatgatggcggatacagaggaggctcatataaaggctcatcaggtggcggaaacggaaccggattattgatatttgcgatctgcctggccgcagcggttggagtttttaatgagttattgggcgttattattctcattgtgtttgcatttattatttggacaaaaaattaagaagaaaggtataacaggaagtaaataatggtaaagaagataatgcgtgatccactgtttcttgcacagaaatcagtggatgctacagaagatgataaacaggtggttacggatttacttgacacattgaaagcaaatcttgaccattgtgttggaatggcagctaacatgattggcgtgaaaaagaatatcatagtggttgcggccggaccgttccagtttgccatgattaatccggtgattaccggaaaatcaggagtttttcagacggaggaaggctgtctctcgctggatggtgtgagaccatgcacaagatataaagagattgaagtagattatctcgaccagaatttcaaaaagaaacatggcaaatacacaggctggacagcacagataattcagcatgaggtggaccattgtaatggggtggtcatatgaagctaaagaatatattaatagtagtggacaatatcgaagagtcaatccacttctataacgaactgtttggccttaatgtgatttcgagacaggaaggtaatgtaataatgtcggagggtatggtattacaggatgccggaatatggaaggaaagcatgcagatacagactattccatataacaatatgacggaactgtattttgaagataatgatatcgaaggtgtggttaaaaagctggagtcagggaggtatgaggtcagatatgccacagcactgacagaactcgacggaggacagaagcttgtaagattttatgatccgtccggaaaccttattgaggtgcgcacaccatgggataaatttgtgaatagagagtgattaggtgttcaggtatatggataaataatctcgtttatttgaagaggctggaaaaaatgcaaatatttgcagatgcagtggattataagcttataagcctctgccacaggggagatatcgttgtatcgcaggattatggagagacaccttaacaagaaagccagacgaagctcacataagaatcatatcaaaggaccgaaaaagcgcacagaggaagatgatgagaggtttgcacagtcgtttgagaaaatgatactgatggcaaaatcaaaggaagaactaaggaacacagaaaggtaataatatttgtattttgcccctcaatccgctatactatagctaagtatagcggattgatatgctttttgtaggaagagatgcagggttgtaggagaaaaaataaatgattaaaaacatagtatttgacataggaaacgtgcttgtcaggttccagccggacgaggcaatgcgtgagattggcattgaagaaaataaaatagcagctttagcccatgcaacatatgaaaaccctgtctgggttgagctggaccgtggggtaattcctgagaacgagataattgatgagatggttaaggtggctccacagtatgaggcggatatcaggagatttttcaaagagggaaaggcttttgttgtaaaggcatttgactatgcagcagactggattaaggagttaaagagcagaggctataaagtgtatttgttatcgaattatccaaaggacttcttcgagcttcatacgcacagtgaacttagttttgtgtcacttgttgacggcaaagtcgtttcagctatggttgggatgataaagcctgatgccggtatctatcagtgcctgtttgataaatacaatctgaatccgaaagaatgtgtgttcatagatgacagaccggagaatatcgaaggtggcagaaagcttggtatggagggaattgtgtttacagactatgagaccggaaagaaaaagcttgagcagatgctgatggcaaaatcaaaggaagactaataaaggattggagcattacagatgaagacagcaatagtatatgcatcagtgcatcatggaaacacaaaaaagataattgacgagatagcaaagacaaacgatgtcgagctgatagatgcgacacagacggtagagaaagacctgtcagaatatgatttaatcggttttgcatcaggagtatacggcggaaagttccatcagtcggtgcttaagtttgcatcagtcaatctcacagacaacaaaaatatatttcttatctgtacatatggcggcagacctgtctttaagtcaattgagcaggtgatagcatacaaacatgacaacattgtcggaaggttttcatgcaagggatttgatacgttcggaccgttcaagctgattggcggggtatcaaagggacatccggatgagaaggaccttgcggcggcagtggagttttacaacggactaacagaacagccagagtttctgaaatagagaaacactggctgtttttataagtctgttctttttatagctcaagatttagcagctggcactactggggggcatttgtgtactatggagtactcatttcattttttgttgatcaaattatatcacaccttatcaacattttaaagtttacgtaattatcgccccacaagaaacataatttctatataaagagtattaaatatcacatcaattcttcatcttaccagtaaactaactgtataataatagtatcattaatggtataatagagacattaaaatcgcaagttgtttaacggagaatgtatgaagaagagaataacgcttattgttttttcggtgctaataattgctgctttatatgtgttgtattgttttaattatattccacataaaaaatatacaaatgcagatttcaatatagaagcttacaagagcaatattgataaagacaatgatggcatagatgaccaaacagatatattaaataatgcaaataattacataaaaactaatccaaaatataaaagcaaatattacaacacaggttatccagatgatgaatatggggtttgtactgatgtagtagcttttgctttaaaagatgcaggatatgatttgatggtattagtaaatgaggatataaaaaacaataaagaattatatgatatagatgccgttgataaaaatatagattttagaagagttaaaaacttaaaagtatatttcgataataatgcaataagtcttactacagatataaatgaaacagaagaatggcaaggtggagatattgttgtatttaaaaaacatatcggcattatatctgacaagagaaatcgaaaaggtatatgttttgttattcatcatgcaaacccatatcaaatatattatgaagaggatatactggaacatcgtgatgatatcataggacattatagaatcagttaaacaactcccagtttttgaaactgagaaatcggaatttaaaaggatgatgatatgatggataaattaaaaaagaacatggttttctacctactgttgctgatagatttttatatcgttccttggtttataaaaaacacaggaagtgcaatgattgttatgttagtaattattcctctaatatgtttaataacctctgttttttatgggattaggaatggttttaacttctggtatattttgattgtagcaataatgtttgcgccatccatatttatattttataactcaagtgcatgggtttatgtagttggatatgctgttattgcattattgggaaatttaatagcattgccattaagaaaaagataacttccggtttatagagttaaaaaatataagtgaaggaggcatgtattatgaaaaaagtaatctatctgcttgtattatgtatggtgctaggaatggctggatgtggaacgaatcaagaaaataaagaacctgtgtctggaaatgtgtccgtagaaatagaaaataaagaaaatgatgatgtagtacaaaatgagcaaacagcagatactggctcatatcctccatgtgttatggttgatggtgttatatataaagacacaggatatgtagcgtcaatgcctggttgcggaacaatggatggagaaattgtgtcaacagtggcagggacagagttaccatctgaaaataatcaatcaaatttcggaagcggatatcattatcaaaggagttctgaaggtcagctcatagtagtcattgatgacgaacgaatcatatttagagatattgaaaaagatgatacgtctattccaatagaggttatcaattttaatgcaaaagtaaaagaaattaccgatgatggagaacttcttgtaacgcatgtgagtacagctgaaggcttttgtcagatgaatgatggagagtattatgtatcggcagaaaatttagcggaagatgttcaggtgggagatatcgttacaatatggtttaatggaatgattcaagaaacataccctgctcaattgggggtagtttatagaatcattaaaacacaataattagtcaaattccagttttcttaactggataaatcggaagttggaaaggggtgcactgctatgctgaaaaagttgaattccttttttaacatcgttattggttcattcataggagttttcattgggttcggaatttataagttctggcactttaatacctatccaaatttatatgccatgcagtctgcaccgtggtacacagagttgctattgggtggtgccttggtggctgttgtggtggtcgtatgtattatcctaaagctgattatttgtaggaagttaaagccataacttcccgtttattgggaagtcacagagaacgaaaaatcgatatttgtggaggtaaagagtgtatgaaaaaggaactgcgtattctggttattttaattgctgtgttattggtaggaacagtaggttactatttcatgccaaagaaattcggtaagaatgtaaatccttctgaggtagaccatataaatgtgttcgatggaaatacaggaactggttttactatcaccgattcagaagatatcgaatatatagtggcgaatattcaaggtatttcaatgaaaagagatggcatttcacttggaagaacaggatatagttttaaaattagttatataaacagcaacgataaagatatcatacctgtatttattctcaatagtgataatacaatttgtaaagatccatttttctatagatgtgatggtggattatgctttgattacttaaaagcatgtgaagagaaatatagaactaatgtaacagaatctatagaagaaaaataacttattgctgataaatgttttgatggggcgatggtttttacattgataataatggtaattattttattggttttgatacctgtaggaattgttgtagataaaaagattgaagcttattttgaaaataaaagagaaccttaaattcttatttattgggaaggcgcagagaacgaaaaatcggaagttgtagtaaaggaggtttacaatggggttttggatttttatgttgattatggatttgcttcttccatttacgatgattggttttggaagatattttatgaaaaaggctccaaaggaaataaattcagtatttggatatcggacttcgatgtctatgaagaacaaagacacatgggaatttgctcataaatattgtggtaaagtctggtatgtctgtggaatggttatgttgccgataacagtaatattcatgcttttagtgattggaaaaaatgaagattgtgttgggagtataggaggaattatctgtggtgttcaacttattcctttaattgggtctattctcccaacagaaatagcattaaaaaagaattttgataagaatggaacaagacgataaatgccaatttttgaaactgagaaatcgggattgaccgagttctttgagtgagatacacttcttggacgaagggaaggaagaagaaaaaagtactttagaggtattatggaatgagtaataaattggttgagcacaaagaatcaaaagaaatattaactggaaatcaaaagaaaattttgttttggatttgtttcattattttaagtatagctttcattacagtctggataaatatacttttgacatctaaagcatttaatacacaaatggaagagatggtactgggagaagattactatatggaggatattgtgattacaggtaaaagggctgaagatgcctcggctgatacgatatctcagaattatttcttctactacaacaatggaaaagtgaatgattatcacaagcgaatgcaagtaccgggatttgtatattcggaatataatgtaggagattccatagctgcatataccacagaccatgttagttattcttattacaagtatgggattcttccggatacagagtatacaaacaatgaattaatgaaagtagctggcgtattgcttggaattggaatatttttattggctttgtttggggtattaagtaagaaaatgaattacaagaagtaaccaacttcccgtttattgggaaggcgcagagagcgaaaaatcgggatttgaggaggtgttgagtatgaaaaggtggctatctattttagcagtatttggctgtatagtagcgttatctggatgcaaaaatgaaaatgaaaagagacaagcatattttaatgcaaaagttttggaaataaataaagaatatgttgatgttaggtgtatagaagcatttaatagtgggatttctgttgatgaggaattttctgttacaaaagatgtggtatcagcagaaggagtaccagaattgaatgtagatgataatatccgtgttgtatttaatggtgatgtaatggaaagtgatccattgcagataggaacggtttatgcaatctatcttttagatgaaaatggagaagtgattccaaacaactaacaacttcttatttatggaggtatatattatgagagtaatcatttcaatcattcttatggtaattgcagcgttggtcggttttttctttggtgctggaatgaacgaagcaatgggtggagcaatactactttcaatgattacaggttttgcttgcactattaatgctattgaaaagaacaagaaggactgacaacttcctgttttgagaattgagaaaatcgatacttgtagatggaggtaatcaaaatgaaagaatatcaatatttgattggaaaaattattgtcgcagtgacaattatagttgccgcaatcattatagcacaggctattggtggagctggagaaagtatccgtagtagcttgttgcaattaagggatgctcttcgataacttccggtttttgaaactgagaaatcgcaatttaaggaggcaaagtacaatgaaaaaagctattattatgatgattgtggtatttgctttagttgtttggccgttcagcggtgtgtggcagctcttgtctggcatcattggcggtggagtccgagaatcctttatttatccgatttatggtggaattattcttctttcaggtattatagttgtttgtactgaactcattctggaagaaatcaaatcgttaaaagacgatataaaagataaaaaagaaggatgctgacaacttcaagtttgtagaaatatctttctaattttccctattttacaggctttccagtccgttcattagtgaaatgatatgtattttcccttatttttgcccttatgagataatcgtaaggctaatatcttataacgataacgaaaggactataattcatgagtagaatacttttggtagaagatgacacaatgattgcttcggggattctgtatgcacttgagacagaagggtatgaaacaaatcatgccacaggtataaaagatgccggaagtttaattcaacattataattttgacctggcaattatagatatgcagcttccggatggaactggatttgatgtaagtgagatattcaaaaataatgctacatctgtgattttcctgacagttgtggatgatgaaaatataattgtgagggcatttgatgaaggagcacaggattatattgtaaaacctttcagaatcagggaacttttggcgagagttcggcgcattttatctgccaatatcaaaaatggagagaaggacaacataatctatatgggtcatgcagccatccatacagatgaggcaaaagtttatgtgaatgataaaagcatagaacttacagcattggaatatcggttgctgcttatttttgcgagtaataaaggaatccttttgacaaggcagcagattcttgacaaaatatgggacgcagacggcaactttgttgaggataatacacttaccgtttatgtgaaacggctgagggagaaacttggcgaggcaatacatattgagactgtgagaggaatgggatatcgtgtggattaagaaaaaagagatagaacagttgtcggagtttgtgaaaggctatagttccggcgaggaactggatattcgagtgaataaggaaggctcttttaacatattaaaaaatgatatttatgctcttgtgaacacgaaaaatgaacagataaaggcagttgaggcagaaagagacagtctctctgattatatggcagatatttcccatcagttaaaaacaccgattacttccatgatgattatggcagatttactggaggaggcagagccggaaaaacaggaagagttcattcataacattcaggtttcgctaaacaaaatggagtggcttgtaggggcacttcttaagatggcaaagcttgatgcccatgcaattgattttatcaaaaatgacatccgcacgtcagaacttttagaggcggtaaaaccatcggtggaaatcctattggatatccacaatctgaccatagagctgaaacaggattgcatcatacattgtgataaacgctggaccacagaagcacttacgaacattatcaaaaatgcgatcgaatattcaccggatggaagtgtgattgagattgacagcggagaaaatcccatgtatagctggatttcagttaaggacagcggtatgggaatggacaaaacagagtatgctgctctttttaaaaggtttgaaaattctacaaatgaaaatggatttggaatcggaatgccgcttgcactctctattctgaaaggacagggtggcgacattgatgttgattttggaggcatgggagagggaacgacttttattttaaaattttttaagtgaattgtttctaagtgacaaaattgtcacaataataatttcttttgtcacagaacagtcattttgcattgctaggatggtatttgaaaaaggaggactacaatggctgttttagaagtaaaggaattaacaaagaaatatggtgaaggcgaatcggaagtgattgcgcttgatcatgtgtctttttcggtagaaagaggagaatttgttgcaatcatcggagcatccggttccggaaaatcgacacttatgaatatgattggcggaattgattatccaacaagcggttctattatcattgatggaaatgagatacaagcaatgagtgaggatgaacttgcaattttccgcagaagaaatctgggaattgtttatcagttttataatctgatacccactcttactgcggaggaaaatattgcgctgccatggaaattagatggaagaaaagagaataaggaacggctttctgagattgtgaatatgctgggtcttgagaaaagggcaaaacatctgccgggacaaatgtctggaggtcagcagcaaagagtatccataggaagggcacttataaacgagccggcatttattcttgcagatgagccgacgggaaatcttgatagtaaaacaagcagagagattctggatattttgaagttcaccaatcagaaatataagcagactattcttcttgtcacacatgacgaaaagatagccctgcaggcgaaccgaatcatcacgatcggagatggaaaaatcataaaagacgaggtgatgaagtaatgaaaataacagcacaactcgccttaagccagatgaaagtgaataaaaaaagaacgattgcaggaatttttgcgatcgcacttgcaacatcacttattacaactgtaatgtgctttgtgacaagcgcaaataagatgcttacggatttccttggctcggattatggagaatacggaggagcatactttctcatgcttgcaataccggcactgcttttaggtcttcttattgcagcaatgtcgattactgtaatatccaatatattttctgccagtgccaataagcggattcaggagtttggtattttaaaatgtgttggtgcaacaggcagacagataagggtaagtgttatctatgagagtttatggcttagtctgacagccattccgcttggactcattgcaggaactatacttggttatattagtgtgaaatttacaggacattttatttccgatatcaatgatgctgcaaaagaaattattatgagaccttttaccttttccctgccctttcatatatctgtgtggacatatttgtttgcaggtgtattttcgttttgcattgtattattctctgcatacagaccagctaaaaaggttggtaaatttactgctatccagtgtgtaaaagggattggagcaggtacagttttgaaagagatccaggtaaaagacagctttatccaaaaaatatttggatgtgagtctgcaattgcctataaaaacatgaaaagaaacaaatacggctataaggcaacgatacgtgcattgtcacttgggattttactctttctgttaaccggaggattatccggtcaggcaaaggaattccaagaatggatgacaccaaaatcaaaagaaatgatggtggattattcttccaattacgatatcgaggtaaatgcgaaaacagggaaagaagagagaaaaatcagccggcctgttacatcagaccaatataatgcaatcgcacaaaagctggaaaagtacgggatagacgtatatggtgttggagcagatacttttacctacaatgcgctattagataaaaatacattaacagaggatatgctgcaggttccgaatttttccgatggtaatggggaaacaaggacagaaatcgtgtccgttgattatgtactctataaaaaattgtgtgacagggcaggcgcagaatatggaagtatccttttgctgaacacttaccaatataatgacaatggagagtatgtgtcgataaaaccttttaaagatgatgtgacacagatttccctgataaacgcagccaatgagaagaacacgcttacaatcggaggtattttagaacagtccgatttaaaggaatatggttttggtgaaatgacaccatatccggtcagaattgtcgtacctgatgcggatgcgaggagttttgactggtttagtatgccatcagatgaagatgattatacagaatatgccagaagtgtcatggatgaatattatccgattgcggcagaggattcttatgtagagcagggatataccgtgagaattgcccgcacagatgctatgattaaaatgctcaatatagctatagttcttgctgaaattgtgatgtatggttttgttatcctgctcgttctcatgggatttacaagtgtaattagtacgctgacgacaaatatcagaatcagaagccgtgagtttgcagtattaaagagtgttggaatgacaaataaatcactttgcaggatgttatatagtgaaagtgttttttgcgttctaaatgcacttgttccgggagtgatacttggaattgccattccatttttaattaatttatctattcggaaggctttcccggtattgtatcatattccgtgggcggcattatttgggggtatatttgttttgataggaattgtgttttttatcacacgagctgaaattcacaagttaagagataaaagtattattgatgaaataagaatggatattgtataaatgtcaattcaagtttgcagaatttgaccaaaataaaaccagttcgtaaaatgacatttttacgaactggtttttgcgttgcattttcaaatgatatttatctattttgtaattaaccaaaatatctgtcaagaagtcccttaagggctcttccgtgtctagcctcgtcacgagccatctcatgaactgtatcatggattgcatcgaggttgttcttcttagcacatttagcaaggtcagtctttcctgcagtagcaccgaactcacagtcaactctccaagcgaggttgtcctttgtagtagccttcatgttaggctcaaggtcctcaccgagcatctctgcaaacttagctgcatgctcagcctcttcgtaagctgccttctcccagtagagaccaatctcaggatatccctcgcgatgagctacacgagccatgcaaagatacatacctacctcagagcactcgccctcgaagttagcctttaactgctcgaagatgtatttcttatcttcatcagagatttcaggattgttcttaacagttgaagcgtatactccaaactcatgctctgcagcaagtgttaaatctccctcaaccttcttgaatttatctgcgccaacgtggcataccggacactctgccggtggattctctccctcataaacgtatccacaaactgtacaaacccattttgccataataatgttcctccttttaaagatagtaaataaatgtttaattgttgtaaaaattgtcaggctctaggaaagctcattcttgcaatccggacaaagtcccgtaaacgaaactgagcagctctcaatggctaaatcagtggattcctgcacctgtgtcatcagctcatcggcgaagtccaaatcgatatccatcacgcgtccgcagcctctgcatataaagtgataatgaggtgctgtattgtaatcgtaatggtcaggaccgactccggtcgaaatcttgatgatttcaccaatttcctcaagcaaggaaaggtttctgtaaacagttccaagactgatgtttggaaattcttttttgatattctgatagatagtttcagcagtcgggtgatcggtccggctcgccagaaagttgactatcgactctctttgacgactatacttaatcatatgaatctcctctcaaatgaaatcaggaattgttactgatatcaatatacacgatagtactataattgtcaagagaaaaataagaataattcctattttatttttacaagatggctcgaatagctataaatcaagtataaattaataacacgcataatattactgcttcactcatagaatagtacaaaacgcgcaggcgggtaaataagcatgaagagattcgttacatacctgtatttatatgatggcagaataaaaggaaataatgcaggctttataaaagtagaaataaacggagaaaaaagtgcatttctagtacagataaaaaatctcggaaaatattccggaaaaggaagagtgtatctgatatatgaagcggaggcggccatagaggcaggagagcttacggtaaaaaacggtgaagcgcgagagatatataatgtagatactgaaaacgtaaaggacagtggaaagacatttttgcaggtgctcggtgtaaaaatagaactggaaaatgcagatgaaaaatttctggcaagctgctggacggataacacggaagcagttataggaaaaccgctcaaggtacaagcagatttatcaaataagaaaaaccctgtatcgactcctatgcctgaaccaggctgtcagaaagaagttcatagtcaaaatgttgatgacagtcaggacaaaatcaggcgcatagacatatcagagcttcgcacgcttccggccaaaaactggtacatagtcaacaacagttttcttacacacggttacgcaaactataagcatctcgtcatcaaaacggatacagatggcaggcaatatctcggagtgccgggcgtgagcgagccgcaggagcgcatgctggcagggatattcggcttcacggaatttgagccggccgccccggcaaatgcagcggatgtcgatagcggagtgttcggatactggttctgccagctgtagtttttatagattgtaagaaaatgtcctttcctctgcacaaaaccacagaaattgtgtataattaaagctaacaaaagaaaactgtgggaggtggcattacatgaaaaattattcaaaggatcctgacagacagtatcatatccaggtcgcaaagggagaggtcggccgatatgttatcatgccgggagacccgaagaggtgtgttaaaatagctcagtaccttgacaatccggtcctgatagctgacaacagggagtttatcacatacaccggcacattggatggagtgaaggtcagtgtgacatcgacaggcatcggcggaccatccgcatctatagcgatggaggagctgtacagatgcggtgcagataccttcgtgaggatcggaacctgcggaggcatgcagacagatgtgaaaagcggtgacatcgtgattgcgacaggcgccatccgcatggagggcacatcaaaggagtatgcgccgatagagtttccggctgtggcagatttagatgtcacaaacgcgcttgttgcggcagcaaagcagaaaaactttacgcatcacacaggcgtggtgcagtgcaaggatgcattttacggacagcatgagcctgaaaaaatgccggcaggctacgagcttatcaataaatggaatgcatggaggatgcttggctgtcttgcgtcagagatggagtcagccgcgctttttgtcgttgcggcaaagcttggagtcagggcaggctcgtgcttccttgtggtcgcaaatcaggaaagggaaaagctcgggcttgagaatcctgtggtacgcgatacggacatggcggttcaggtggcggtttcggcagtgcgaaacctcattcgtgaggattgcgccggagaataagtcagacataaaacacagaaacggagaacagacattggatataaatgaaattttaaaacacgttgaccatacacttttatccccacaggctacatggaacgaaatcaggcagatatgcgatgatgcgataaaatatcacacagcatcggtctgcataccgccgagctatgtaaagcaggcgtcaaagtatctgggtgaaagggtaaaggtctgtacagtgataggcttccctaacggatattcgaccactgcggtgaaagcctttgagacagaggatgcccttgcaaacggagcgaaggagatagatatggtcatcaatatcggctggctcaaggataaaaggtatgagctgatagaggatgaaataaagaagctcaagtccatatgcaaggataaggtgcttaaagtcatcatcgagacctgctttctcacagatgatgagaaaatcaggatgtgcgatatcgtgacgagcgcaggggctgattatatcaagacatccacaggttttggcacggcaggtgcgacctttgatgatataaagctgttttcagagcatatcggagagggtgtgaagatgaaggctgccggaggcatttcttcattagatgatgcagaaagatttcttgagcttggcgctgacaggcttgggacaagccgtgtggtgaagcttattaaggctatggactgaattttcgtatacaataaataaccggggaattatatatggataaaaaaacaattgaaaaactgattgatacagcccttgcacagcttgacttttcatatgcgccgtactcaggcttcaatgtaggtgcagctcttttagcaaaaaatcaggcagtctacaccggctgcaatatagaaaatgcagcctacacaccgacaaactgtgcggaaaggacagcatttttcaaggcagtgagtgaaggcgtgcgggattttgaggcaatctgtatcgtgggcggaaagaaccaaaaaccgacaggttatacagcgccatgtggagtatgccgccaggttatgatggagttttgcaatccgaagacctttaaaataatactggcaattgacagggaaaactataggatttacacacttgaggatatgcttccgcaggggttcggacctgcgaaccttgagtagagtgacctgtagctgtacctttaaggggctgtataatgggctgtaatagttgttgattatatggtggtgtgaacattagccgcctcaacaggaagtgggaaaccggaaatgggggaaatatggagagagaagagaatataagagacaatataataaagctgccgaaaatagagcttcattgccatctggatggctcattaagccgtgaatttgtcgagaaaaggcttggcaggacggtgcaggaggcagagcttagcgtgtcggatgactgcacaagtctcgcacagtatctggagaaatttgacttgccggggcagtgcatccaggatgaaaaggggcttgagggagccgcctatgatgtgcttaagggcatgcaccgggaaaacgtcgtatacgcggaaatccgctttgcaccgctgctttcagagaatgagagcatgagctgcgagcgagtgatagaggctgcacttaagggaattgagagaggtaaaaaggattttggcatagaatgtgggcttattgtgtgcgccatgaggcatcacagcgaggaacaaaacagacgcatgctgcacaccgcaagggaatttttaggcgtgggtgtgtgcgcggcagacctcgcaggtgctgaggtgccttatcctatgtcaggcttcatggagcttttcaaatatgcaaagcagcttgggctgctttttacaatccatgcgggagagtgtggaaatgcacagaatatcatagatgcagtgaaggccggcgcggccaggataggccatggaatagccatgagaggccacggtgatctggaaaggcagctttcggcaaagggcataggcatcgagctttgtccgataagcaatctgcagacaaaggcagtggcttcagcagacgaatatcccatcagggagtttttggatgcgggattaaaggttacaataaacacagacaaccgcaccgtaagcaatacaactctgtcaaaggagcttgagttcatagaaaaaacatatggcatacgcgatgaggagctgccgcttatgatgaaaaatgcactggacgtggcatttgcagatgatgccgtgaaggagcggatttttaggcagttggtatagtaccgtgaggcttatggagatttaacatttaaccgcagcataaatttacggaccggaaaatggaggtatgacaccatgaagaaatataacagaatttttgtgatagtcctggattctctgggaatcggcgcgatgccggactcggaaaggtttggagacacagatgtagacacctttgggcatatacttgagaggatgcagactctggacatcccaaatcttacaaggcttggaatgctcaacctgcattgcggcggtcagatgcagccgactgctgagccaatcggcagatttacgcggctggcagaggcgagcaacggcaaggacacgatgacaggccactgggagatgatgggcataaaaaccgaaaagccgtttaagaccttcacagagcacggatttccaccggagctcatagctgagcttgagaagcagtgcggaaaaaaggtcataggcaacaagagcgccagcggcactgagataatcgaggagctcggagaggaagagataaaaaacggttcgatgattgtatacacgtcagcggattcggtgcttcagatttgcggtaatgaggagacctttgatttacagaatctctaccgctgctgtgagatagccagaaaaataacactcaaggacgagtggagagtagggcgcgtcattgcaaggccatatgtgggaaagaaaaagggtgagttcgtgcgaacctcaaacaggcacgactatgcgcttaagcctacaggtcttactgcattaaatgcattaaaggacagtggactggatgtcatttcagtcggcaaaatcaatgatattttctgcggagagggtattacagaggcattccgttcaaaaagctcggttcatggaatggagcagaccattgatatttgtgagaaggattttaaagggctgtgctttgtgaatctggtcgatttcgatgcactgtggggacatcgcagaaatgtgacaggctacggagaggaaattgagaaattcgacaaaaatctgggcattttaatggaaaagctaagggatgatgatctgctcatactgaccgcagaccacggaaacgaccctacctacaagggaacggaccacacgcgcgagtatgtgccttttatcgcgtattcaaagagcatgaagggcggcggcgcaattgaggaggaagccacctttgcggtgattggagccacaattactgacaacttcggcgtaaaaatgccggatggtaccatcggacattctattcttgaagagctttaatgggtaatatctcaggaattttttaaacttaaacagaaaatatatggagaaaaaaatgaacagtatatatgaaaaactcaccacatgccttgcaagtgtgcgtgaaaaaacagattttgtaccggagacagccatagttttgggctcgggacttggagactatgcagagcagattaagatagagacaaccatagattacaaggatatcaagggctttccaacatctacagttcccggacacaagggcaggtttgtatttggatatgtggatagtgtgcctgttgtcatcatgcagggcagagtacattattatgaggggtattcgataacagacgttgtgctaccgacacgcctcatgggaatgatgggcgcaaaaaagctgatactcacaaatgcggcaggtggtctcaatactgattttaatccgggagactttatgctgatttcggaccatatcgcgacagccataccaagtccactgatcggagccaatattgatgagctgggcgagcgttttccggatatgagcgaggtatacagccgcagaatgagggaaatcgtaaaagaaaaggcagataagctgggcataaagcttagagaaggagtctacgtacagctcacaggcccgcagtatgagaccccggccgaggtcaggatgtgtaaaattctcggaggagatgccgtcggaatgagcacagcctgtgaggcacttgcagcgcgtcatatgggacttgaggtttgcggaatttcatgtatcacaaaccttgcagcaggactatccgacaaaaagctcaaccacaaggaagtgcaggaaacagcagaccgcgtggcaaagcagtttacagaactgatcactgctgtggtgagagcagtgtaaatgggcttatttattaacaagcccataaatatagtgattacaccactgtccatgcagcatcagataatccctaagcagtccctcctgcacgaagccaagcccattaagaagcttcatcgaaggcacatttcccgggtggacaaccgccgtcactttgtgcatgcgaagctcattaaaggcaagcttggtgcagaagccgactgcctcagtggcataccccatgtggtgaaactcactggaaaatttatagccaatttcacagcttccgtagaaagccggagcgatattatgtatacacacagtgccgataatccggtacggattttctttctcaaaaacataaaatctgaaaagctgtgatttgacagccatattgtattcatatctgagcaccttctgcaggtgcttcacagtataaaagtccggcatacggtctatttcatacatttcgaaaagctctttatccctattgtaaaaatccaaaacctgcggggcacaatcagcgcgcaataccttaagaagcaggcgcggggtttcatattgaaaaaacatattttccttctttcacatttggtgtatcatgtaattattcaaaaccacctcacgcacattcgcaaaagcgcacgatactccagtggttctgaatagttattgtattataatagattataacacatggagcagacaaatatgacacaagatgaaaaatatatgaaacaggcaataaaacaggcaaaaaaagcatatgcactcgatgaggtgccgatagggtgcgtaattgtagccggtgacaaaatcatcgcacgtggctacaaccgcagaaataccgacaaaaatccactcgctcatgctgagctttctgccatccgtaaagccagcaaaaagaccggagattggcgtcttgaggaatgcaccatgtacgtcactctcgagccctgccagatgtgtgccggagcaatagtacaggcacgcattccaagagtggtaataggtgccatgaatccgaaagcaggttgtgcaggctcaatcatcaatctactgcagatgcagcagtttaatcatcaggtgcagacagatataggcatctgcggcgacgaatgcagcgccatgctctctacctttttcaaggagctgcgaaagaagcgcaagcttcaaggacagtaaaataaattgtcgttaaaaccacaacgtaaggcaaggaagttgcaataaatcttgacaaaaccccgcattatagcgtatacttaagactccgagcagccggggtggtagcggtaccttgaaccaacaatccgctatagttggggtgatgcttcgtagagggcttaagcggtggagctgccctccataagtggcgttgacgtctgggtcttgcgcaatggaaatctatgaaccgtgtcagggtgggaacacagcagcactaagtagaagctttcatgtgacgcgaggcagcctggagggagttaactgtggaggtaacgtctgttgtgatggttcgaagcgaggcgctcggatttttagcgtataaacatcgtatgataacacagttaatcagcggaaattctatttccgggctgattaactgtgttatcagacggtgcaacggaaaccgaaaattgtagccacgcagtggctaagaagcctcgcaagaggcgaattttcggttgtggtggcacggtttatacgcacgaaataaggaaaatcgaggcatacaatgattcaggacattgcaccacatacgtgggacataacatacaaaaacatacagccggacccggacagcagggtccttttttttagcaggggacagcttcttgtgcagcaggcatcggacaagcctgctgacgaatccaatgaggatattcatcagataagctttccaagatatgatgatataaaaacagaatgccacgacgctaaatatcagtatctgtttacacttgacgatactgcctttttcagggtggcactgtcacatgctgacaaaatgcatatactggaagtaacaggtggcaaattcataaaccggcactatatgcgcagtacggcaccgaaggagtacgtgcttgccgcgataactggatttcatctggatggctggtatgataagaaccatttctgcggcagatgcgcaaacaggctggtagaggacgatgtggagcgcatgctcagatgtccggtctgtggcaacatggtttacccgcgcatcaatccggccgtgatagtgggagttaccaatggagataagctgcttttgacaaaatacaatggcagagagtataaaaagtacgcacttgtggcaggttttaacgagataggtgagtcacttgaggagaccgtgcgccgtgaggtcatggaggaaacaggactgcgtgtgaaaaacatcagatactacaaatcgcagccgtggggctttaccgacaatatacttgcgggatatttctgtgaagttgacggaacagatgagattgaggttgacatgcaggaactttcgatggcaaaatgggtgtcaagagaagaaatacctacatccctagaggaattaagcctgacaaatgaaatgatttctgtttttcggcttgacaaaggcgatttctgaatgtatagtaaaacagtaggaaatgaaacagaggtgctataaatgaaaatttcaacaaaaggacgttatgctcttcgcctcatgatggatcttgcagagaacaacactggttcacccatcagcctgaaggatgtagcgaagagacaggatatttcagataaatatcttgaacagattatatccattttaaacaaggcgggctacgtcagaagtgtcagaggcgcccagggcggatacatgctgaagatggaaccgcagaactacacagtcggcatgattctcagacagacagagggcagccttgcgccggtagcatgtatagaggatgacgagatagtctgcgacagacagcagcagtgcgtcacatctattgtgtacaagaagatcaatgatgcaatctcaggtgtggttgacaatatcacattgcaggatctggtagactggcagaacgagaagaatggaaattatgtcatataaagaaagaaggttatcatagatgagcagattaatttatttggataatgcggcaaccacacaggtatatccggaggttgtggatgcaatgcttccttactttacagagcattacggcaatccatcagctatatacagctttgcagatgaggcagagagagcagtggatcatgccagaggagaggtcgcagaccttatcggagctaagaaggatgaaatatatttcacaggcggcggcagcgagtccgacaactgggcattaaaggccacagcagaggcatatgccgcaaaaggaaagcacatcatcacatcagccatcgagcatcatgcaattcttcacacagcacagtggcttgagaagcatggctttgaggtgacatatgtgggtgttgatgaggacggaaaaatcaagcttgatgagctgaaggcagccatcagacctgacacaatccttatctcagttatggcggcaaacaacgagattggaactatccagccgcttaaggagatcggagagatagcaaaggagcatggcattttgttccacacagatgcagttcaggcattcggacatattccgattaatgtagatgatatgcatatcgacatgctcagcgccagcggtcacaagctcaacggaccaaagggcatcggtgtgatgtatatcagaaagggcgtaaaaatccgctcatttatccacggcggagcacaggaacgccagagacgtgcgggaacacacaatgtgccgggtatcgtaggactcggcaaggcagtagagcttgcaaaggccaacatggcagagcgcagcgaatatgagacaaagctcagagaccacctcatcgagagagtgacaagtgagattccatatacacgcttaaatggacacagaacagacagactgccaaacaatgcaaacttctgcttcagattcatcgagggagagtcaatgcttatcctgcttgatcaggcaggcatatgcggtagctcaggttcagcctgcacatcaggctcactcgacccatcacatgtgctccttgcaataggactgccacatgagatagcacacggctcactgcgtcttacattatcagagaagaccactcttgaggatatcgactatacagtggacaagttaaaggaaatcatagcaaggctcagaagtatgtcaccgttatacgaggattttgtaaagaaaaacggcaaatctgaggcataaatgatcagatcagaaattatagtgactatcacaacattaatatatacatgaaaattaggaggaactaaggacatggcatacagtgaaaaggtaatggaccattttaaccatccaagaaacgtaggagagatggagaatccaagtggtgtcggcacagtaggaaacgcaaagtgcggagacatcatgagaatgtatctggatatagatgacaacggcattattcaggaggccaaattcaagaccttcggatgcggcgcagcagttgcaacaagcagtatggcaacagagctcgtaaagggcaagacaatccaggaggcgcttgaggttacaaacaaggcagttatggaggcacttgacggacttccacctgtaaaggtacactgctcacttctcgcagaggaggcaatccatgcggcactctgggattacgcagagaaaaacggtatcaagatcgagggacttgagaagcctgtaaacgatatcagcgagaaggaagaggcgcctgaggaagactattaatgaaaaagaaggttgtagtaggaatgtcgggcggagtggattcgtcagtagcggcatatttattaaaggaacagggatacgatgtcatcggagtcacaatgcagatatggcaggacgaggacgtatttaaacagtcacaggagggtggctgctgtgggctatctgcagtggaggacgccagacgagtggcagcagtgcttgatattccgtattatgtgatgaacttcaaggctgatttcaagaaatacgtcatagactatttcgtgtccgaatatgagcgtgcatacacgccaaatccgtgtatcgcctgcaaccgttatgtgaaatgggagtcgctgcttcaccgctcgcttgagataggagcggactatatagcaacaggccattatgcccgcatagcacagcttccaaatggcagatacaccatagccaactcagtcacagcggaaaaggaccagacatatgcgctttacaatctgacacaggagcagcttcgtcgcacgctgatgcctgttggagagtatgaaaagccacaaatccgccgtatcgcagaggaagcaggtctgccggtagcgcacaagagcgacagccaggacatatgcttcgtgccggatcacgactatgcctcattcatcgagaatgagacaggcaaaacctatgagccgggaaacttcgtggatgaatcgggcaatattctcggccgtcataagggcctcatccactatactatcggacagcgcaaggggcttggaattacagccgcaacacctttattcgtgaaggagttgcgtccggcaacaaatgaggtcgtaatcagcacaaatgagtcgcttttctcagacacctgttatatcagcgatataaactatatggcacaggagcacatcacaccggacacccgcagcataggaaaggtacgctactctcacaggggagctgactgtacacttacccctatggaaaacggcatgataaaatgtgtatttgacgagccacagcgcgccatgacaccgggccaggcagcggtattctatcaggatgggcatgtgctgtgcggtggaacaattgaaaagatgatggtaaattagcaggacttttgaatagtcgcgaatatattataatagagcagacagcataactaaaatgccgtctgctctattaaattatagggaagtttaaacaactagaagttatctgtgtatcgtacagaaaaaatttcaattttatgtttatctctaactcaagaattctataattgttaatatcaaagatacaataatacatattgctattattccggaaccaaaaattgctactattttcatttgtttcgactttctattttttattttttcaagtatacctgttgtataaagaaccattgtagccaacgctccaacacctaagcctaaacatgttcctttcatacactcgtatatcggaatcatagaatcataattaattgcttccataactaatcctataactaaagatattagccctataatacttatcaattttactctctttaatattactgacttttctgcacctgcataattagacattgcttctgcaacttcttttacttctttttccataatctcgcttttcctttctccattgatgatttcaggaatacttacattgaaaaatcctgcaatatcaactaatagactaatatctggcatattaacccctgtctcccaacgagatacagttcttccagatacatttagattttccgcaaattcttcctgtgtaattcccttttctttacgaagttctttcaaaaaacttcctattttcttttggttcatattagctgcctcctttcatcaatagactaacgtaatgagcaaatatacaacacgacacaaagcgagagaattccgtatttacgctattggacaaatctgtctagtattatttatattgattttagcctcaaaaacttaaatttcacgaactaactacattgtcaaaaaattcattacaagattcaccattatatctttttcttctggtcttgactctgcaatcataagcgtaatagcaaccaatgctccatcactgattatcttactgtaagctgtaaaccgagatgctgaaaatattaagcagtgttccgagatttggtgttgttttgcaggattcgattcgagctacggatgattgtggaataccacacattgcagcaagctctctctggctaagtccgagagaagtacgctgctccaccatggcacttacgattgaggatatattttcaacctcatcaatgtcttttcctatctacatttccataatcgtggactatacgatttctcaatccatagattgcattccatggaacgtttcctctgtggagtttatattcatctgacaatttttttgcattctcagatatttgaatcatacgaaataacatggaatcaagaaggacttcatttgcattaagttcttcaatatcaacatttttcatatgtgtaacaacaaattctaaatcctgtttcaaccttttaatataataagcatcattcttaacattatccatatatttttactccatcttttagtatttcctgtgtcagctcaaaattatctttcaattgatttatatcaagtacatcaacttttttgtgaagtgcagttcttatatcctccactaatccatagaattttaatccggtcgcatctgtcgaaattaaaagatcaacatcgctggttggtttggccttaccttttgagtacgaaccaaacagataacagaaattaacattatatttatcaaatacaacagagcattttctttttatataatcaatatcaactataccattttcttcatcaataggattaatctcggatattttttccaacatatatttgtactttatgctatctgcctttttttcatcattttcataagatttgtatgaacgcaaagaaactccgagtatatccgcagcttgattttgtgttaattttctctcaattcgtaaagattttaattctcccatgcttgcacctctgaatatagaatagtgcaaaaattgcactttgtcaagctggatagtgcaaaaattgcacttttatttttaattttatgtaactattctaccaatatgattttagaccatttggaatcacgagcttaatgtgtaataacacatagatattgcaacgaaacaacgtatactcttcttaatctactattttttataagattaagaagagtatatttgagttttgacttgttttttgtccaaaataccgttatactttacttaaagtgtataaaaaatagagattaagaaaagtatagcgatataatatattttgggtggaggtgcaggatgcttgtaggtagagaaaaagaattacatttattgcatgatatacaaaatgatgatagctcacattttgtggcagtatacgggcgaaggagagtgggaaagacctttctgatacgtgaggcttttggctatagatttgcatttcagcatgccggtctgtcagagggaggaatgaaggagcagatatatgcgtttacgtcatctctaaaagatgcagggtatgaagtgaaaaagcagccccaaaactggcttgaggcatttgaagcattaaaggatgtcataagattgtcgagtgaaaagaagaaaataatatttattgatgagctgtcgtggatggacacacaaaagagtgatcttatggttgctttggagaatttctggaatggatttgcttctgcaagaaaagatatagtccttatagtgtgcgcgtcagccacatcatggatgctctcaaaggtcgtacacaacaaaggtggattgtataacagattgacagagcagatacatctgcgcacattctgcctcagggagtgtgaagcgtatgtaaaagctgccgggctggcattaaacagaaatcagatattgcagtattatatgatttttggcggagtaccttactattggggatttttgaaaaagggattaagcctttcgcagaatattgatagtatattgtttgaaaaggatgcgccactgcgcgatgaatttaagtatttatatgcttctgtattcaaaaaaccggaaaactatgtaaaaataatagaagctcttgggactaaaaaggttggaatgacaagggaagaaatcattacagcgaccaaaatacctaattcgggagatctgacaacgaagctcgaagagcttgaaagctgtggatttattcgcaagtacaatgcatttgggatgaaaaagaaaaatgcgatataccagttgatggattgctttacattgttttatttcaaatttttgaaatcagaaccgacagatgagcatttttggacaaaccagattaatacgcccgcagtgaatacgtggttggggctggcgtttgaaagagtgtgcatggagcatgtggatcagattaagtttaaactgggtatttctggcgtgctgacagaggtaaattcgtggtactgcaaatcagatcctgataatggcattttcggctcacagattgatatgctgattgccagaaaagatcaggtgattaatttgtgcgagatgaaatattcgcagtcagaatataccataacggagaaagtggacaggagcattaggaataaaataagtgatctgagagtggtttccggtacaaagtatgcgatatacccaacacttattacaacctatggtgtagtggaaaactcgtattcgcaggagctgcagtcggttgttatgatggatgatctgtttgcctgagataaaaaattaaaaaccccataaattcctgttgacagatagggattcatggggtatatttatatcaacaattaattcatacaaatacagtatgaatataggagattaaaacaaagcattaacattacaatgacatcaaggaggacacaaacatgtcaaacatttatcagggaacattaggacttattggaaatacaccgctcgtagagcttacacacgtagagaaggcatacggacttgaggcaagacttcttgcaaagcttgagtacttcaacccggccggatcagtaaaggatagaatcgcaaaagagatgatcgagcaggcagagagagacggaaaactcaagccgggctcaacaattatcgagccaacatcaggaaatacaggaatcggacttgctgcaatcgcagcagcaaagggatataagattatcatcgttcttcctgagacaatgtccatcgagagaagaaacatcatcaaggcatatggcgcagagctcgtgctttcagacggtacaaagggtatgaagggagccatcgccaaggcagaggagcttcatgagcagattcctgacagcttcattccggagcagtttgagaaccctgcaaacccggaggcacacagaaagacaacaggtcctgagatctggaacgatacagacggacaggtagatgcattcgtagccggagttggaacaggcggaacaatcacaggaacaggtgagtacttaaagagtaagaaccctgatgtaaagattatcgcagtggagcctgagacatcagcagtgctttcaacaggaaaagccggggcacacaagattcagggaatcggagcaggcttcgtaccaaacacattaaatacagaggtatatgatgagattatccctgtatcaaatgaggcatcatttgagtatggaaagattatcgcaaaagaggagggcgtacttgtaggtatttcttcaggagcagctctctatgcagcaatcgaggtagccaagagacctgagttcaagggcaagacagtagtagcacttcttcctgacagcggagatagatactactcaacagatctttttaaggactaatatattatccattttaggcatttttatcaagatatagctaatatattagctgtaaatatttttggctataaaaaaaggaacccgcgggttcaatgtcattaagttaagaattttgacataattataaaacacatcatatttgcaattgtttgataaatatgatgtgttttacacgacaccgaagccgtggactcgcaatgcgagtggtagaggagcattcttaaaaccgacgaagctgtaccggaaggagcagtggagggataagaagagagaatgccggaatgagtagcgagagaaaggtgagaatcctttcggccgaatatctaaggtttccagagtaaagctgatctgctctgggtaagtcggggcctaagcacaggtcgtatatccagtcacttctgggacatgttgatcctcgctctacagatgtttaccttcatgtgagcaacaagacacttcttgggatccgcagcccattcgacaacccggaaggtggtgaatcatgagtaaggattgtacgattcaggatgtttttcatcatttttatccatcttttgaatccacacatgatatttctcccgctcagagaaaagccgcttaccacatcatgaattgcaaaaccggcgcctttggtgtgaatgtaagcgtatgcgaggactgcggttgcatatcagtccactataactcctgccgtgacagatgctgtcctatgtgtcaggagtttccaaaagaaaagtgggtagatgcacggcgtgaggatatcttagatgccccttatttccatgtggtttttacagttccggaagaacttaatcccattatctacagcaaccagaaattcttatactctgctctttatcatgcggcttcagatactctcagtgaacttgctgctgattgtaaatatcttgggactgatatcggctatatttgtatcctccatacatggggaagtaccatgaattttcatcctcatatccatgcgattgttcttggtggagggctggatgtgaaaaatcattggaaagacaatgggaaagattttttccttccgattaaggtaatctcaaaaacgtttcgtggaaaatacatggctgaacttaagcaactctgggaaaatgacaggcttgaatttcatggatcggctgcaccttacaaaaaccactatactttcaaggaattgttaaatacctgctatacaaaggaatggattccttattgcaagaaaccatttgacggtgccgaatctgtcatcagataccttggaaaatacacccaccttgggaaaaggatatctttagggcgaccacatttgaaccaatactctgtgagaaggtctaaatttttttgagacagaatcgtataccggtcaattctgcctttggtttcacgaacatgaattgtcatgttggtacgtgaaatgtcatcataatgaagatgaacaacctctgatacacgtaatccagaagaatacatagttgcaataatcgctttatgcttcagattcggagtggcgtcaatgattgcatttatttcatcgcgggatagaacggcaggaagatttcgctctcttttcatagccggaacagtgtcatcatcccagacagtattcagcacctttttatataagaactttattgcagaccgatagtgattgtgagtttcaggagaccttccttccagacgtttagcggtacttcgtaccgttaaaaatggaatagccgttccgcagtagcggaactggcattccgtttgagcgtaatttgcagccagaaatttatcatatagtgaaatacatatgataataagtacgaaaataatggcaaaaatagctgaaagcatataggattttggaagtgagtagcagatgtacaaggttatgtagcttaacaataaacaaatgcctaaaatagtaatattgaagagcaacaagtacatgtttttgatagtatttgatttgaaaagattgcaatatagacaataaacaacgtaagctattatttccacaagaatggatttgtaatcctgatagatcacattatcatatagcaattgagcatcagaaaatagcaggctatgtaaatgctaacttcccaaatttttcctacttagcataaaaaaaacaaaaaattcaactacaatcaaacgctagatccattaacactacttattctggaggttttattatgtataaagatatttttgaatccatccgcaatgaagcggaaaaacgtaaccttcgtgaaagaactattcaactgtattgctctgatgtcagttacttccttcgttggattggaaaaaatgtttctgatcttacacttgaagatgcggaaagttttcttactgccaaacgtctggaaggaaggtctcctgaaactcacaatcactatcggtctgcttatctattttatgatgaagtctttgcactttgagcttttgtttttgtatattcttttgagtggactctcctttctttaaattctcatatttacgtgagaggcatctttgttctctgcgcaatttcttttccaatttcttaactcttgctgacttattgatatttttataagttttaccattagaaacaatcgccaggtctttcaaacccaggtcaatgcccataccgtcattgctattattagcaatcttagcatcgggaatttctacaagaactgacacataatatttgcctgctttgatagatactgtaccgcttttgattttccatccgtctttagttgttggtatataacctttttctttaatgcgcacccaacctaaagtgggtatgttcaacctatgtctctcacatctacagtctttaggattgttctttacgaaatacattttttcacatagcatctgattccaatataaaccacatgcaccagtaataatagtgtaatgagatttatagaaactccctttttacaaaagtgtgtctgatgcatattaactcataattatacgaaacaccacacttttattcattttctattcatttcttactaatgggtattcatttttactctaggttgtcgtgtaatttattagaatggaatttttgaaagagccagcaccttgaatgggctgactctttcaatgtcacctgtaattgacaaactggaattgaacaaaatcgctgcgcgatggcctgccaaggctgtggcgcagttttctactcctaaataaaaaagcagtggaaactaaaatgagttttttctatacttcaaaatacttgaaagtatagtgtttatgcggataatcgaaaattagatataaaatttattgaaaataatgtattaaaatatgagctgcattctgcagatgcgaatgtaaaagctttacatagagtcgggactgtctgcagacggaaatggcaaaaataaaacaaagagaagaggaggtacacatatatggatatgtgttatgatggaacactgtcaactgcttttggcttatctagctggctttttactgaaggtgaaaaacatggtgaaatgtatattggatttgattcaaaaaagaaaaaatagtttggggatatggtagatattagggataaaaatgcatcaaacgtaacaaaattgattcttataatattttatattgtgatttttaaaaatacagagttgccaaacagtttttttataagatttgcttctaaaaatgaggctttgttagacagaagaaattagaaaataaaagaaagtgaaaaaattatagttgtgaagataattgcggatgtatcatggctttgtgcttggacttttggttgatatacgtgataattatgaaatgaaaaacgaatcgttgaaattagtgattcactgtccataggtgcggcaattgaaaatatgattctcacggcaacgggatatggattaggtaccttatggattgccaatacttgctttgcctacaatgagttgatggattttatcggaacagccagccagttgacaggaattgttgctgttggctttgcctatgaagctccggctaaaagaccaaggaaaccattggaagaaatcgttgagtatagataggaaaatcggattgatcaaaatctttaatataatgtgtttggcatttgaagtttggaaaggttgaagtaaaaggatgaatttagaagaattaaaggaagattgtagccaaaagcaaaagaaaggtattcactttattattgcatcaatagtaatatggttattgctatgattttcagaggacatttgttgccttatagctggttatataattcaaattcatatctgatattgtcaataattattccaatattatctttaatagttggcttaaattttgcaaattattttcttgtaacaatgatgatagtgctagaaataatatttagcatacttttgtcatttgaaaataaggaaatacttaaaaattagttatataaatactgcacaagattttggaaaaagtgtgacagtgtctcaccaattcataactaaaccagatgtattagtgaataatccttcattttcacatattcgagaaataatggtgttggagctcttttatcaggaaagggataatgaaaagatatgatatatttaagtagttttagattaagtaaaagaaaagtgaataatcctaatatttatccctacaatgtattccgggataagtatattgaaccatttgtttttagacctatcactgtactttatggcaacaatggctcaggtaaatcaacactcttaaatattatagccaattgcttacaactaaaagggaaagaatatgcaacaagcaattcatttggaagcgttgattactgtggttcgttttccagagaatgcttgtatactttgggggaagacgattatggaaatacaataaataaattaccggaaaatagccgatatattaaaagtgaagatatattgtatgagattaagaagatacaacaaaagcagatattatcagatggcatggagtatgattacgttaagagaggtatgtctttacttgaagcaaaaaaatttttagcatctaaagaagggtgtaagcaggaagaatatataaaatttgcacaggaaaaatattctaacggagagacatcaatgcaatattttgaggagtatttacaaccagatgcattgtatttgttagatgaaccggaagtttcgctttcacttgcgaatcaggttatgttagcagaggaaattaataaaatggcaaggttgttagaatgccagtttattattgcaacgcattcaccatttatgcttggaacattaaatgctaaaatatacaatcttgatacgaaagagtatgatgttacaaaatggagtgatttggataatgtacgatatttttataatttcttcaaaaaacatgaagatgaatttaaagtgtaaatgcccaaatattagtttaatttaaaggaggatattgcatgtacaacgaaaattattctataatattcagtagtatgacaggcaacacacgtaagctggctgataaaattcatgaaatcctgccaaaggagagctgtgattattttggcacggctgatgcgcaggggataaaatccgaattgctatacattggattttggacggacaagggaaacgcggatagcgatacattagatttcttatctaaattgaaaaataaaaagatatttctgttcggaacagccggttttggaggaagtgatgcatattttcaaaagattcttggcaatgttaaaagcgccattgattcaagcaacactattgtaggagagtatatgtgtcagggcaaaatgccacagtctgtgagggagcgctatgtgaaaatgaaagaaaacccggagcattcggataatattgatgcgctgattgaaaattttgacaaggctttatcacatcctgattcagatgatttggagagattaaaaaatattattatttagcaggaggtattatatatgtacaatttcacatttaacattccaacaaaaattcatttcggaaaggataccatttcgagcttatcagagcttaaggcatatggcagcaaggtgcttttagtgtacggaggcggctctataaagaaaaacggtctctacgataccgcaatgaagatccttaaggatgcggggctgaccgtgtttgagcttagcggagtggagccaaacccaaagattgagacagtcagaaagggtgttgaaatctgtaaaaatgagggtatcgacatggtgcttgcaataggaggcggcagtacaatcgattgctcaaaggttgttgcagcaggtgcaaggtatgacggtgatgcatgggatctggtgcttgatggctcaaaggtcaaggcggcacttccgatatttgatgtgcttactctttccgcaacaggaacagagatggatccttttgctgttatctctgatatgtctaaaaatgaaaagtggggaacaggatcaccgtatatggtgccaactatgtcaatattaaatcctgaatatactttttcagtatcaaaaaaacagaccgcagcaggaaccgcagatatgatgagccatacaatggagaattatttttctatggagaatgctgactgccagaaatttatggcagagggattgttacgcacaatgattaaaaatggaccggctgctctcgcacagcctgataattacgaggccagagccaacctgatgtgggcaggcacacatgcaatcaacggcgttgtgggcgatggctgttcaccggcatggtgcgtacatcctatggagcatgagctgagcgctttctatgatattactcacggagagggacttgcaatactcacaccggcgtggatggagcacatactaaatgatgacacacttccgatgtttgtggagtttgcaaaaaatgtctggggactttccggtgatgatgactatgcacttgcacacgcaggcattgatgcgttgaagaaattcttctttgagacaatgggcattccggcaaatctaagagcagtaggaatcacagacgacaggaactttgaggtgatggcaaagaaggcctgcgagggttcaaagggatcgtttgtaccgcttagcaaggacgatattgtggagatttacagagcggcattctaataagcgtggagcctggacataccgggctccacgcttatttttatgtttaagaattattgacgtatagattcaatcagtgcagaaatggccttgatttggctaggtgtcagtccattggtgtctagtaaaattgcgggcatatcattacttttcccaagtaagtagtctgtgctgcatttatacagatacgatagagaaagaagaatttctgcactgggtgtgcgttctccggtttcataaccggaaatgatgcttggtgatatgcctaatagctctgaaacctgtttttgtgttaatttattctgaatacgcaattcttttagtctaccagctaaattctttatcatactcttttagcgaacctccacacttttagtgtacatattttaatattgaattctacgcaataggggttgttttatacatataaactacactttaagtgttgacatactacactttaagagatacaatgcactagaagaaaatttagtttttatacatgagaggtcagaaatggacgactatagaaacaaaaaaagacaaaaaatgagagcaagaagaaggcgtgcacagaggattaaaatgacaggtatgtgtattgctacactaattgtgtttatttttatagtgttccttgcaataagtaatttgtcaaagataaaaaagaatgtaaccttagaggcaggtagtgaaatcaacattaaagatttcctgaaaaaggaaaatgcagatgctaagtttgtgactgacgtttcacagattaatacaggaaacataggcagccatgaaattgttgtaaaggttggaaaaaaagaatatacatcaaaattgacaattgaagatacaaaagcacctactgcaaaggcaaatgatgtgacggttaataaagatggacaaattgaggcaaaccagtttgtgacggatataaaggatgcaacaaaggttgatgtgagctttaaggataagcccgatgtatcaaaagacggagagtcagaagtgataatcgtgttaactgatgaaggaaaaaatcagaaagaggtaaaagctaaactaacggttgtgagtgattcggagccacctgtgattgagggagttaaggatataaccgcatatataggtgaaacggtctcatataaaaaagatgtgactgtgactgacaatatggatcagaatccaacacttgatattgataacagtaaagtgaatctgaataaagcaggaacatatgaggttgtatatacagctacagatagtgcaggaaatacatcgtctgcatcatcaaaaattacaataaaagagaagcctaagggatatgtagataaagaagacgtatatgctcttgcgcaaaaggttgttgaccagattactaatgattcaatgactgatatggaaaaagcgtttgcaatatacagatggacaaaaacaaacataggatatacgggaacatccaacaaagatagctggacaatcggagcttatcaggcatttacgaaaaaatcaggagactgtttcaattattatgcagcagcaaaagctatgcttgatgtttgtggaatacaaaatgttgatatagtgaaaagtgatacttcacattcagcacattattggagcctgataaatcttggagatggctggtatcattttgatgcaactccaagaaaaggtggaggaaattttttcatgttgaccgatgcagaactggcagcatattctaccaagcataaaaatagtcatatttttgattcttcgctgtatcctgaacgagcgactgtatcagtacaggacaaaataaattatgcaaagggaacgataaacaaataaggtggaataaatgagacttggtataattggtggtcttggaccgatggctactgcctattttatggaactgcttattaatatgaccgatgcaaaatgtgatcaggatcatctggaaatgattatttataattgcccatcaataccggatagaaccgcatatatcttaggaaaaagtaatgcaaatcctgttgtcccgattataaaaatcgggaaaaaactaaaggaacagaatgtggattgtatatctattccgtgcattacagcacattattttcatgatgaaatagaagaaaaaacgggctgtaaggtgattcatgctattcgggacacctcatatatgttaaaagaggcgggattaacaaaaatagggataatggctactgatggtacaattcaaagtagaatttttcaaaatgaaatagaaaagaatggaatgcatggacttgtaccggataaaaaatatcagagaatagtgatggatattatatataaggatataaaggcgggaaagatacctgacattgaaaagtataatgttgtagccacgcatttgaaaaacaagggagctcaggtaattatcctgggatgtacagagctttcattactgaaaaaacaatatgatattaaaacaggagtcatagatgcaatggaggttcttgcaaaatcatcattaatacagtgtaacaaaagagttaaaccgaaatacaataagctgtttgtaccattcaactaaagtattttgatatgaagtataggagaaaaagatgcaaattacaaatgttttggaatacctggaaaatacagtaaaacgagttccggataagactgcctatgcaaatgaaaacatggaaatgacatttggtgaggtataccatgatagcagagctatcggaagttatttggcaaataacaattattataaagaaccggtagtagtttttatgaaaaagcatccacatgctattacagcattttacggatgtgtttatggtggctgctattatgtgcctatagatgatgaaatgccggaattcaggattagacttatttttgaaaacctacatccaagagtaatgatatgtgatgatacaacaataaatgccgttgaaaaatttgattataatggagaaattctattatatgatcatgtaagaaaaaatgaaatttcagatgagcagttattgggaataagggatagacagctggatacggatcctatttatatagtgtttacttcaggttcaacaggagttcctaagggtgttgtagcatgccacagatcggttatagattatatagagaatctgtctgaggtgttacgttttaatgagaatacaagatttgcaaaccagacaccgttatattttgatgcgtgtcttaaggaactatatccgacattgaaattcggtgctacaacatatattgttcccaaaagtttgtttatgtttccaataaaactggttgaatttttaaatgagtataagataaatactgtctgctgggttgtgtcagcattgactatgatatcagcatttaagacctttaacaagattaaacctgaatatttgcatactatagcgtttggtagtgaggtatttcctattaagcagttgaaaatatggagagaaactttgccaaaagccagatttgtaaatttgtatgggccaacagaagcaacaggaatgtgttgttattttgaggtggaccgagagtttgagttggatgaggtagtgccaattggacgaccattccataatacagaaatattattgctggatgagaataataagctggtagaagatggaaatgttggtgagatctgtgtcagaggaacttcattaacattgggatattacaataattttgaaaagactagtgaggtatttgtgcagaatcctctcaattcgagatatcctgaattgatatataagacgggagatttaggaaaaaggaatgaaagaggtgaactgatatttgtatcaagaaaggactatcagattaagcacatgggacatcgaatcgagcttggtgagatagaggtaaatgtcaatatgattgaagaaatatccacatcatgtgctgtttacgataaggaaaagggaaagatagttttatattatatcggagaacttgaacctgataaattggttaggatccttaaagataagcttccaaggtacatgattccaaataaaacagaaaagctggagcagatgccattaacagcaaatgggaaaatagacagagtatttttaatgaaaaaagcacaggaaagataaaggagaaaaaagatgaacgaattattagaaattttaaaggaattacaccctgatgtagattatgaaaattgtacaacactgattgatgataagatacttgattcctttgacatagtttcaattatatctgaggtaagtgattcatttgatgttgcaattccggcagaggagattattccggagaattttaattctgcaaaagccttgtatgatttaatagtaagattagaggatgaataaaagatatgctgtttacatcttatagctttatagcttttatgactatagtttttgtcctgtattatctggtgccaaaatcgtgtcagtggcctttattattggtatttagttatattttttatttcattgccgatccaagatatctgatattcatactggtgacgacaatatcaacttatttgataagtcttaaaatgaatcagattaatatggcgcaggataagtttattaaagaattcaagggaaatttaagcagagagcaaaaaaagaattataaaagccatatgaaacataaaaaatggatatggcttttgatatgtcttttcataaatattggtatattaagcgtaacgaaatatactaattttgtgattcaaaatattaatgatatgctgcatggagtttccggtttacatactgtcaatatgattgtaccgatgggaatttcattttatacatttcagactatgggatatataattgatgtgtatagaggaaaacagagtgttgaaaagaatttctttaagctggcattgtttgtttcattttttccacaattggttcagggaccgataagcagatttcatgatttatcggagacattattttcaaagcattattttgaaagcaatgtggtagtatcaggtttgatgcggattttgtggggatatttcaagaaagttgttattgcagacagaattattacaggagtaacaaccctgatacacagtccttctgaatatcaaggagcatatgtgtttatcgccatgttgttttatgcattcgagttatattgtgactttaccggtggtattgatattacgattggtatagcagaggttatgggtattcgtgtgacagaaaactttaatcttccatatttctcaaaaaatatcaaagaatattggaacagatggcatataactatgggtacatggtttacagattatattttttatcctatttcagtatgtaaacctatgcttaatttgtctaaattttcaagaaaacattttggcgaggtaattggtaagcgagtgactgtgtatttgtcagcctttgtagtatggtttacaacgggattatggcatggtgcagcatggaacttcatcgtctggggattaatgaactttgttgttattatggtctctcaggaactggaacctttatatgaaaagtttcataaaagatttagtgtaaaaggtaaagttccatatgaagcatttcagattctaagaacatttttattgatgagctgtataagaatgtttgattgctatagagatgttcctttgacttttaagatggttggaacaatgtttacaaagttcaatataggtgaattatttaatggttcgctgctttctatagggcttagtgtggctgattatgttgtgcttatagtgggatttatagtagtttttacagtgagtctttttaaggtaagagtaggaaatgtgagaacggttttattacaaaaacctccaattgtttattttggaattatggctgttatgattatgcttattatagtgtttggcgcatatggtataggctacgattcgtctcagtttatctacaatcagttttaaggagagtgcgatgagaagaaaaaaaataacagcatgcattttggttgctgtcctgcttattggagctctgtatattgttcaaaggcttctggttcccaaatatcagacaggaatagttgaaggctctatggttgaagaatactataaggataggtcagatcacgaagttttatttgtgggcgattgtgaggtttatgagaatttttctaccatagaattatggagaaaatatggaataacaagttacatcagaggaagtgcacagcaattaacatggcagtcatattatttattagaggatgccttgaaacatgagactcctaaagtggtggtgtttaacgttttggcattaaaatataatgagcctcagagtgaagcttataacagaatgtctatagatgggatgaaatggtctatgtcaaaggtaaatgacattaaggcttctatgacagatgaggaaaattttgttgattatatttttccgctgttgagatatcattccagatggtctgagcttacaaaagatgatgtgaaacacattttttccaaagacaaagtgactcataatggatattatatgcgtgttgatacaaagccacaacaggaatttccggatccaacaccacttaccgattataagcttggtgataaagcaatgggatatttacagaaaatgactgatttatgtaaggaaaaaggggttaagcttgtacttataaaggcgcctacagaatatccttattggtatgagcaatgggatgaacaggtgcagcagtttgctgatgaaaatgatgttgactacatcaattttattccattgcaaaatgatataggcctggatatgtcacaggatacatatgatgcaggtttacatctgaatactacaggcgctgaaaaaatggcagattattttggaaaatatctggttgaaaattataatttaactgattacagaaatgatagcgagtatgcttctatatgggataaaaaagaagctgcatatgattctatgaaacaacaacaatatgatgaattgaacaaatatggtgaattgaagagctttggtgcaaatgcgattcaaaattaggaggaagaacgatgaagaaaattatttcaataatgttatgtattatgctttcagtatctatgatgacagcatgtggaagtaaagagtccgacaatgataaaaaagatgttggttctgagacaaaacaggatgtatttacatatgatttaaagggtgtaacagttgccatgaatgaaaacatggagccattggtaaaaaaacttggggatgcagataattactttgaatctgattcctgtgcttttcagggaaaggataaggtatatacttatggaagtgttaagataacaacatatcctaaagataacaaggattatgtttatacaatagaattacttgatgatacagtatcaacaccggaaggaatatcaataggttctgataaaaaggctgttgaggaaaaatatggagatgcttctgactcaactgagacctcgtatatttacaaaaaaggagacagccagctttcatttatatttgatggagataacgtgtcttcaatagtttataatgcaattacagagtaaaataccagtgaagaaaacaaaaataatagcatgtatttgcctgatagttttgatagtggtgtgcagtgttttaagcactaaggaaatcagtaaacataagaacgattcgagtcaaaatgtatctgatgatataaatattcagaaaaagactacaattgagacgtcagaattacaagaagaaaaatcagatatatttgtaccatcaacagatgataaaacggtagatgtatcttctgataacaacattgtaagccaatatgcagtgttggttaatgcagacgatggagctattattgcttcaaagaatgcaaatgaaaaaatgtacccggcatctatgacaaaggttatgacacttttggttgcagcggagaaattaaataatgagagtcttggccagaaaattgaaatttctattgaagcaactgattattcttttaaaaacgactgtagtgcagcagggtttctggttggagagcaggttactattgaggatttattaaatggaattatattgccttcaggtgcagaggctgcgtatcaggccgcaattatgacatctggaacattggagcagtttgtggatgatatgaataaaaaagtacaggagctgggaatatcacagacgacacatttttcaaatccagtagggatatttgatgaaaataattatagtacagcatgtgatatggcggttattttacatgctgcgatggaaaatgaaatatgtaaaaaggtgttgtcagcaagaaattatacaacttcatgtacacaacagcatccgcagggaataacattttcaagtaagtttttgaaccgaatagatcgtaaatttggaaaaggaaaagttgttggagcgaaaacaggatatgtaaaccagtcacgatattgtgcggtaagtatgtatgaaagtgaatcaagtaataaatatatatgtgttactggaatggcagggaaagcctggcagacagtatatgatcatatagccttttaccaaaattattgtaaatgaagtgtatgtattggttattaaagggataaataagccatgttaccaccacagcggtgagaacatggcttatttttatgtctttatttatcttgatacacctagctttaccatgagagcctcctgtaaaacgcgtgatacgttgatatgggatttctcagcttcctgattaagccaattagggagagtgacatttcttcgtaccgttttattgctaacttcccaagattttcctactcaacgccatcataagttatttgacagcgttgagtttcttttgttacttgctttccgattgttttaattcttctcagttccaccttcttgcccttcggacaagaagtatccctcgttcaaagagctcggtcaattcaaatcttctattgctttcagtctctgctgaaaactgaaagttgtcagtctggtaattcaaccaatactgcttcgtcaatatcaaagtaatcatccatattactgctaagcccagatgctttccaagcttgttcgaaggtaatatcttctatgttgcttaaataaatgtatgtgctgtccttaacggcattactcagtcgtccactgatttccaacctgtatttgtagatatgtccatcgcactgccatgtaccgtctgacatttcactgtatgttttcatgtttccttcaattgtgtcaatcggctttattgactgtgtaccacaacccgtgattgaggccgtaagtaaaagacatagcaacaatattagtattttcttcatggtcattacctcccaaaattcaaagttttctattttttcttctccttttttaaaaaataaacagcaatagctccaactaatagtggaaagataaccctcccataatttacaccacctattcctcttgcactaatacctgaaatcaaataactaataccattcaataaccctgtaattgctaaaatcaaaattactatacatactatctttttcatacaatcactcctttatcaaattccgattgaacaaaatcgctgcgcgatggcctgccaaggctgtggcgcagttttatttttattaaaaaagcagtggaattacttttcataatccgttattgttaagttaccacacgaaacaactgaactaagaaagctccactgcctatgataagaataacattttccagtctcttccgcaatcggaattatgacgctaatgcacctccgaataggtagatgtaattattaacactacttattctggaggttttattatgtataaagatatttttgaatctatccgcaatgaagcggaaaaacgtaacctgcgtgaaagaactattcaactgtattgctctgatgtcagttacttccttcgttggattggaaaaaacgtttctgatcttacgcttgaagatgcggaaagttttcttacagccaaacgtctggaaggaaggtctcctgaaactcacaatcactatcggtctgcaataaagttcttatataaaaaggtgctctgaccggtacataatcgtaccttctcttcggagcaggagtgacaggtggtgcatggttgtcgtcagctcgtgtcgtgagatgttgggttaagtcccgcaacgagcgcaacccttatctttagtagccagcggttaagccgggcactctagagagactgccagggataacctggaggaaggcggggatgacgtcaaatcatcatgccccttatgacttgggctacacacgtgctacaatggcgtaaacaaagggaagcaaagctgtgaagccgagcaaatctcaaaaataacgtctcagttcggactgtagtctgcaacccgactacacgaagctggaatcgctagtaatcgcagatcagaatgctgcggtgaatacgttcccgggtcttgtacacaccgcccgtcacaccatgggagttgggaatgcccgaagccagtgacctaaccgaaaggaaggagctgtcgaaggcaggctcgataactggggtgaagtcgtaacaaggtagccgtatcggaaggtgcggctggatcacctcctttctaaggaaatttttaacatgagagtttgatcctggctcaggatgaacgctggcggcgtgcttaacacatgcaagtcgaacgaagcactttatttgatttccttcgggactgattattttgtgactgagtggcggacgggtgagtaacgcgtgggtaacctgccttgtacagggggataacagttggaaacggctgctaataccgcataagcgcacggcatcgcatgatgcagtgtgaaaaactccggtggtataagatggacccgcgttggattagctagttggtgaggtaacggcccaccaaggcgacgatccatagccgacctgagagggtgaccggccacattgggactgagacacggcccaaactcctacgggaggcagcagtggggaatattgcacaatgggcgaaagcctgatgcagcgacgccgcgtgagcgaagaagtatttcggtatgtaaagctctatcagcagggaagataatgacggtacctgactaagaagcaccggctaaatacgtgccagcagccgcggtaatacgtatggtgcaagcgttatccggatttactgggtgtaaagggagcgcaggcggtgcggcaagtctgatgtgaaagcccggggctcaaccccggtactgcattggaaactgtcgtactagagtgtcggaggggtaagcggaattcctagtgtagcggtgaaatgcgtagatattaggaggaacaccagtggcgaaggcggcttactggacgataactgacgctgaggctcgaaagcgtggggagcaaacaggattagataccctggtagtccacgccgtaaacgatgaatactaggtgttgggaagcattgcttctcggtgccgtcgcaaacgcagtaagtattccacctggggagtacgttcgcaagaatgaaactcaaaggaattgacggggacccgcacaagcggtggagcatgtggtttaattcgaagcaacgcgaagaaccttaccaagtcttgacatccttctgaccggtacataactccataatagccttgttctttccgtcgtttatattgtacaccttacatttaagctcaagattcggctcatcggtcggcttctcaaacgcatcggacagcttaagctcctgaacctccggctgttcctcctcaccattgtaaaataccacaaaatgtggtgtcggtatctttaccagtcttctgccatagatgttcttgcccttttttgttccttttttcttgtcgctgagcatatctgacaatatcacactaaaataaataagacttctcaccggcatattaggacaaactgtggactgatgctcatatatgctcaatctcgcatccacgataaacgatgcatcatttctgaccgaaagtgannnnnnnnnncggacaaactgtggactgatgctcatatatgctcaatctcgcatccacgataaacgatgcatcatttctgaccgaaagtgaaatgccgccatcgtgaatcactatctcaacatcctccggattgtcatagctagacccattcattgcgttatacagctgtaaggctctttccttatcctgcatcagcatactgaaaacatcacttttgtactctctgttaccactcatataaaatcctccttcatttgaaaacacaaaagcaggaaatatctgtgtggtaaaacccctcttatcctgctttaaataaaataatgaaacatttaaaagcaagaatttcagggaatatgaaaaataattaaggtattgaagaccctgcacgcccttatcgctggacgacatcttattatgcctcacatatttacagagcatatagtcatatctgtaataaatgtgccaacgaccgcacaggttgctatagaaaaactgctttgattatattctaacatatgtgaaagaaatagcaagcggtttgtattttattatattgtttttgttgtatatgcaacatatttttggacaaaattatagtaatattgtattataaataatgaaatcaacattcaagaaagaaggacaagaaatcctatggacaaggttttcaaaatagaagatttacgccctatccgcgacgagatgaccgtctcacgaaattcaaggcttagtgacaaaacacccataacctatttttctctcggaaagggcacgtcaatctctcaggaatcctacgataataccactgtatacatcggtgcaaaaggatgcgctgattttcttatcggagcttatgctgcaaagcataccatatcagaaggtgatatgctggtagtcccttcgaaaatactctgcggagtaacaacagaaaccggctgtatttacaccgaaatcatcataaaaaaggagaacaacaatatgaacaaaattatcaaatcaggcgaggtcatgaagcttaaggatcttatctcatatgaggatggcagtatcacgaacattgatgtggtaagcaacgacacaatgaaattcgtgcttatggcattcgatgagggcaccggtctcacaccgcatcgcgcgcctggaaatgcaataattttcgcactcgagggcaaggctgtaatagactacgagggcaaagattacacaatctcagcaggcgaaaatttccgttttgacaaaaacggactgcacagcgtaaccgctgacgaaaggttcaagatgggacttcttctggtgttggagtaaagcctgcttcactcttttttcaaatcccatgcccctgcttcctaagcaccggcatggtgtatatcttcaccaaaagcggtatcaccatgataaaccatacaagcggctctgctactatcactcctgtatagccaagcagtggcacaagtgtaaatgcaataattatctttcccaccatctcaagtgagcttgatacaagcggcgtaatctgctctccaagcccctgcattgcatttcgcactatacatataacagcggtcacataataaaacagagtgtcaaatttgagataatttgtggcattttttataataataggattattagtgcctgttacaagcttcaccagccacgggcctatagtgtagcttgcgataattgccatcgtacaccatatgcaggtatagaatattgccagttttatgccctttttcactctggtcacttctcccgctcctatattctgcccacagaaggtcgccatggtctgtccgaacacggtaaacatgaccatgaatatctccgatatctttctggcagccgtgtgagctactataatatcctgtcccagtcggtttatggcggtctgcagggtcagcgagcctatatttaccagcgaactcataaatgccatagaaagacctgccttaagcattgtcattttcatcacggctattacttcaggagtcatattattcttgctgcctttaccttctgcgccttcgatatcacaattttcgccgcataatttcatgcttcttcgcagtaaatgactgtcaaataaatcactgcgggacaatctcaaaagctcatatctttttaccatatatacatagcacacaataaacgcaataacctgtgcaagtacagtggcaatcgcagcacccgccactcctgccttcagtacgaccacaaagaaaatatcacctgccatattcagacagaccgagacggctaatatgacaagcggcgtaactgtatcgcccagtgccctgagtgccgccgcacatgcatcatacaaaaatgtcgctacaagccctgctattataataaaaatatatgacacagccattcccatcaaatcatttgatacatttaaaaatccaagaatctgacgcaaaaataacaggcacaataccgttatagcaagcgctattatgcatcccattttaattgacagagcaaacgatttctttacaccggcgtagtcccttgcgccaaatttctgggctgttattatggcaaatccattagctaagcccatcaaaaagcctatcatcagattgctgagtgtcgtggtggctccgactgctgccagtgagttttctcccagatatgatccgactattctcgtgtcaactatactgtatgtgagctggagtatatttgccataaatattggaatggcaaatgccagtatgagtcttgatggttttccttttgtaaggtctttcatgtatgtatatcctcgtatatttcaaaatattttcatcaatatattagcagataaattttaaaattcaatctttttaatcggtaatataatcatttctgatcatactaaaatataaacaacaatatatagtttatatacactatatttatacacatataatttatatgcattctgtttacatgtattgaatttatacgtatcatatgttatatatacactgtagagaggtggataaaaatatgccgatgcttttaccaatatggtttcagtagatgttaatgcatatgccaaagcttaaggctcattagatatctgcattataatttggagaaaagatgaacaacgatataaaatacaagctggccaatgccatgaaagaatgcatgttttcctctcctgtcgagaaaattacggttaaggaaatctgcgatacatgtggtgtgaccagacaaaccttttacagaaattttcaggacaaatacgacctgataaactggtattttgataagatactgattgaatcctttcaccagatgggtgagggcagtaccgtgtacgaaagccttgttaaaaaatttgaatatatccggatggagcaccttttctttaaggctgcttttaaaaatgatgagcagaacaatctaaaggagcatgattttgagctgattcgtcagttttatattgaccagattgaaggaaaaagccaccggaaaatatccgacaagctattgttccagcttgaaatgtactgtcagggttctgtctttatgacaacacagtgggtgcttggcaataaaaactttacccctcaggagcttgccggactgctcgctgatgctatgccaaaggagcttgccgacgtgtttcgcgaggtaaacctgatataattcaaggtaatattcaaaaccatttagaacaagtatcttgcgtttttacaaatgtgcacggtagtcttaatagttatatcagcgttaaaaatccgggaatgctgtcaattgacagttcccggatttttacatccctgtaagctgttgcagaattacataatcttacggaaaagagccttcaaatcctcaacacttgcatcctttggatttccaggtgcacatgcatccgcgtgagcagactctgcgaggaagtctaagtcatcctccttaatagcttcaagctttgttgggattcctacatctacagagagctgcgctacagcattgattgcagcctttctgtactcctctacagacatatcatctacaccctttactcccattgcgcgggcaatttcacgatatttttcgcctgtgcagtctgcattgtactccattacgattggaagcatcatagcacatgctactccgtgtggtgtatcataaacagctccgagtgtatgagccattgaatgagcaattccaagtcctacatttgagaatcccattccggcaatgtactctccaagtgccatgccctcacgtccctctttttcattggcaactgcacttcttaaggatcttgcaataatctctattgctttgagatggaacatgtctgtcatctcccaggcagcctttgttgtgtagccctcgatagcatgtgtgagtgcgtccatacctgttgatgctgtaagtccctttggcattgatgacatcatgtctgggtctacgattgcgatgattggcatgtcatgtgggtccacacatacaaactttctctttctctctacatctgtgatgacatagttgattgtaacctctgctgctgttcctgctgttgtaggtactgcgatgataggaacacaaggcttctttgtaggtgcaacaccctctaagcttcttacatcctcaaactccgggtttgcgatgatgataccgattgcctttgatgtatccatagaagagccgcctccgattgcaatgaggtaatcagctcctgatttcttaaatgtctctacgccatgctttacgttgtcgattgttggatttggcttaatctctgagtaaagctcatattccaatccgttcttatcaaggatatctgttacctttgctgtaaccccaaatttgattaagtcagggtcagagcataccagtgcttttttaaagccatgcgcttttgcctctgttgcaatctcctggattgcacctgatccgtgataagatgtctcgtttaacatgattctgttagccatagtgtaaaatctccttccaattttaaaaaatactcctaaaaaactctgccgataaattcttataacttatctgcctgactatattttaacaaagtattaaacgagatgtaagttacaaacctgccaatgtgtaacatcccggctgtaatatataacctgccagttacctatatgtatcccaccggttgccaatcagatcttagagctgtctgttatgaccttcttaagctctcttgctgccgcactgatcgggtgatgtatatcatataccatacatatatttctctgcggtatctcctcctccagagctatctctacaatctcgcgatttgctatcgcagcctctgccatcggctttggcataaaggcaagaccaagctcacttttcacaagcggcagtatctggtctgtcgttgcggtctctgtatcaggcgcaaattcaagtccgtgtgacataaaaaatctgttaaaaaactgaaatgtcatggtctcccgccccagtccgataagcggataattatgcagctcatttaatgacagagtctgacttccgagcgcagtaaaagtggtaccacccacgagaatctcctggaacgagccaagctttatcatcttaagagggacctccacctcaaccggtgtcgataccactgcaaaatcaatcatgccgttttttacggcatttatagcctgtggggtggagtgattatatatcttaagcctgatacccggatatgccatgtgaaaagtctttagcctgtcaagcagatatatgtttagagctgtctcactggctcctatcgatacgcttccgtgtgacagtcctgtgctgtctgacagctcctcctccgccgcaagtatctgtgacatcgctgcagatacatgcgcgtacagacgctctccctccggtgttagctgcacacctctgttatttctgataaaaagtatgctgtttatctgctgctctaagttgttcatggcgcgggttacattcggctggctgtttccgagcgccctcgcagcctttgtgaaattgcagtattttgcaacataataaaatatcttgtagtactcaaaatttatatccatatttaaagcctcctttttattatcgttttaccggtcatttttccgataatacacagatactaatgatataataatatgatatttcaattatatcaattatactttttacttattataatcataattgtataatcataaatgctcaaaagagaaatattgattatatatataagaaaaggacgtgtttcaaatgagtgaaaagacaatgtttccaagagaagatcatgcagacattctgtttcagaagatattaaatgatccatgggcctgtgacaggcttatggaaaccttcaatgaaaatctggtttacaatgatgaatttgatgtatctcttccggcagaaaaatttgctaaagctctcttcaatgcatataccaaccgcgatctttccgcactgcttatgtgtctgtgcaacaacaccgtatttgatctgctgcgcaattcatatatcataccgtacaggttcaatgccgacggacaccaaaatccgataatcatgaccgatgaacacggaaatccgctgcccgagtataaacacatatctcacgacaagaactatatacattttcacgaaatatataacgatatgccagacaaaaaggatatctactacgcacaggcttaccgctacagccacacatatgattccgagcatatgactcccacgcagcaggtcattgtaaagcatgacggaatactcttgatacgagagcttcccgataccgtaaaactcaaggagactgaggctgaggcttactctgctgtatgggatctgatgatacagattgaaaaggagcttcctatggcatatgttttttacggtcaggactctcttgtggaaaatgacaagcggtatgatgaaattggtattttcctgcgaagctctcatttcctaaaaaatctagaaaaacatgtccaaaaggccgaggcgataatttatggcagataacagctacacagatatcatggaaaaaaatcatatggaaatcccctggcatgattatgccagacaggatggaaatatactcatagataaggcgggactgattgaaaaagcctctgtaatcggacgtgtcggactcatcatgctctcctgcggcacaggagcctggcgtgtgagaacctccatgaaccggctctcaaaggtgcttggtgtcacatgtacagtggatgtcggacttatgtcaatcgagtttaactgttttgacggcactgactgtatatcgcagtcactcagcatagcaaacacaggtgtaaacacctcaaagctctatcgcatggagcagtttgtcgacaattttcctaacgaggaagctcatctgaccggcgaagaaatccaccgtcgactcgatgagatagagcagattcatgccatttactcccctgcaaggcttgggcttgcagccgctatagcatgctgtgccttcacgtttttgctcggcggaggccctatcgagatgatgctggcatttatagcagccggcatcggaaatctcatacgaaccaagcttataaagcatcattttaccttgttccttaatatagcggtatcaatttctgcctcatgcttcatatatgcggcacttttaaaaatagcagagatggctttcaatgtaccatcaattcatgaagccggatacatctgttccatgctctttatcattccgggatttccgtttattacaagcggaatcgacctggcaaagctggatctgcgctccggtcttgaacgccttgcctatgcaataataatagtcatggtagccacgatgtttgcatggattatggcactgcttctgcgactgcagcctatggactttgaagacctgaatctgacccccgtactacatctaatcctgaggcttataatgagcttcttcggtgtgtttggattctcaatcatgttcaacagtccaactcccatggctgcaacagccgcacttataggtgccatagcaaattcactgcggcttgagctggtagacctgacaggtatgccggctcctgctgccgcatttgccggagctctcacagcagggcttctcgcatcatttatcaaggaaaacaacggatatccaagaatatcccttactgttccatccatagtcataatggttccgggactttatctgtatcgggctatatacaatttcggcataatggcactttcggatgctgtttcatggtttgcatcagcaatcatgattatcattgccctgccgctcggactcatctttgcaagaatactaactgataagacgtttagatattgcacgtaacagaatcatacacattataagcagacttgttttataccattcaaatttctgacagcacaagctctgcaccaacatccaaatattaaactcaaaaaacaaggaggcattcatcatgcttacagcagttacaggaataaactggggagacgagggaaagggtcgtgtcatcgaccttctcgcagaacatgcggatatcgtagtccgctatcagggtggtaacaatgcaggacacacagtagttaataaacagggaaaatttgtcttaaatctgcttccatccggaatacttcacccagatgtagtatgtgtgctcggtgacggaatggttattgacctaaaccatctgtccaatgaaattgcacagatcagaacacaagatgtatctgtttcaccaaaaaacctgaaattatcaacaagagccacaatttcaatgccgtggcataaaatacaggatgagcttgaggaagagcgactttcaaagtccggagcagccttcggctctaccaaacgcggtattgcctatgcatacagcgataaataccgtaaaaaaacaatccgtctcggtgatttactccacttagacgaagagaatgtacaggccagacttaagacaatgcttgaagctaaaaaccttgagcttgcaggctgctatcatcaggaacctatgtctctgtcagctcttttgtcatggtgcaggcagaaggctgcaaaatatgcaccttatatcacagataccggtgcattcattgaggatgcactatcaaagggaaagcgtgttgtacttgaagcacagcttggtgcaatgagggatatagactatggtattttcccatatacttcaagctcctccaccatctcagcttacggtcctataggtgccggtatccccggtgcctcattagatcatgtggtcggtgtactaaaggcatactctacctgtgtcggagccggaccatttgtcgcagaaaaagctatgaacggtgaatggactgaaatggtccgcaagtatggaggcgaatatggtgctgccactggaagaccacgtcgtgtgggtccatttgatgccgttgcaagccgctatggtctaaaatgccagcatgctgacaaaatcgcactgaccaagctagatgtcctgagcatcatggatcagattcctgttatcacaggatatcagtataaaaatgccgtaacaaacgtctttgaccctaccgaaaatctcgaaaaatataccccggtagtcaaaatgctgccggggtggaaaaccgatatatcaaattgcaggtcatatgatgagttgcctgtaaatgctaagcgctacataagcttccttgaggacatgctaagacacgaaatacaatttgtctcagttggagctgagagaaatcaatatcttctcaatggtaagtggctgtaattgcctttaaccgacctttgccttgttcttcttagtcgctgcctctgtcatcgcatacggattaagcaccacatcaagctgcttttccttcataagtccgtgatttaaaagcagcttccggcagcgctcctcatttgcggttattccaattatgcagttgtcagtaagtatgtctacagcatgcgtgagtgtgcttatcgaatcaaaaagattatagaattgattccgtgattctaaaaaaatactatattatttttctgatttactaagatattgtatacacgaatgtgctgccacatttccttctccgacagccttcgtatactggtatggcctgcccgtgcagtctcccgccgcaaaacagcctgctacatttgtctgttgggctctatccaccaatatatgtccgttttctatttcaagctgcggcataagctttgatggtgcgatggcgttcctgaggcagaatactccgtctacgctctcagtctttccgcttcgaagcgtaattccttccacaaatgagtcaccgattaatgctataggtgcatcctttgatatctttacattttgaagctctatttcactgtcattataggctgggaaatacaatacctctgccgcaagatccgcaagatatttcacctcatgctcatactttttgtcattgcatatgacagctatccttttatccttgtaaaacatgccatcacaggtggcacagtagctgagcctttttccaagcagctcatcctccctgtccagctgctttgcagacatcacacccatgcaaagtatgagagtccttgcctcatacatctcattgtctgcaagcaccataaagccgtttcctgcaggcatgatattggtcacagtcttttctgttatatcaattcccgcagctctcctatgagcgtcaaagcgttcaaacagctcctgtccgcttatctgtggaaatccgggatagtttgtgattttctctgccttttgcaccttttcgcttaggttcttcgaaccaaaccaaataaaatcctttttatatgtttttaaattcagggctgccgacagtccggcaggacctgttcctattattatactatcatacatgctatgctccttgtaccaaatgtttgtatatatttagaccttatatattgtgggacactaaggtatacatcgaattgcatgcaagcatgcatcgatgatatcttttgaccctataatcatattatattattgcaatgtcacatacagtgcgccttcaatgcttcgatatactcccttgcatatcgtgagagtaccacaccctttctgctgataatgcctatcctcatatactcctccacatcaagtggctttgatataatattccttccattcaactcagcggaaatcactcctgagcacactgtgtagccatttaagccaattatcagattaaaaagtgtagctctgtctctgactctgatattctttctgctgtcaagagtgctgacaaactcctccgaaaaatactgtgaattgtactctccctgctcatacgtcaggtacggatagtcctgcagatcatccatcgtgatgctcttttttgaagcaagcgggtgactgtcacatatgaatacatgcggtgtggctgtaaaaagctctgtgaactccagttcattacgctttagcatctttgaaagcacctccgtattcttggagcttagatatatgactcccagctcactctttaaattcgtgacatcctcaataatttcgtgagtctgctcctccctgatggtaaaatcatactgatatgcatcaaactctctgattacatccacaaatgcattcaccgcaaaggaatagtgctgacacgataccgcaaagtgcggcttactcaccacatcatccttgtagattccctctatgagatctacctgctcgagcacctgtctggcatgaccgagaaatctctcaccatcttctgatagtatcactcccttgtttgtcctgatgaaaataactatctgcatctctttttccaggtcatgtatagcgctggtcacagtgggctgcgagacaaaaagctgctttgcagcctctgttatattgccgcattctgccactgtcaccacgtattttaattgttgcagagtcatgctcattctcctccggttacatatcgaaatattattttacacattaaatgtcttacatcgcttaagtcatctcgaaactattactgtataccgataatctttctcagaatctcacccaacagctttccaagcataagcggaatgacaacaagcaccacataccacagcagcttgtcataccacaccctgccatcatttatcacacagataaagtgcatggcaacaactgccactgcaaatacagatgcaagaagctgcaaaaagctcgccacatgaagcttatttgttaccttgccgaacgtaaataaaagcatcgcaccaaataacatcgctatatctgcctcccacggtatcattttactatacgaaaacagcttaaacatatcacgaaactccatatgcagctcaagaaacaaatccactgatgctatcatgagcaatactgctcctattgtcgaaaataccgctgccagatatacataattgtttccaatcctgtgctgtctgagcttatatttaagcataccctttttctgcacatactgtgtacgcagataagaatctgtcgcagaggcaatagccctgtcgcagtactcggctgctgtcctgtatactttgactccggcatcgttatttttaagggcaaactccacaaggctctctcctgccctgttgttgccacgctccgtcgcagtaaccagataccctgcaccaagcttctgctccttgccatcaaaaaaggtagcgaccagatactgtccgtaatcggcaagtgcatccacatttccaagctccaccgctttcttccaccaaaacactgctcgcccgggatctctgtatgtgccctggcctctttcaaacatatttgctgccatattcattgcatctgcatcttgcgcctctgccagcgacagaaactgacgaaatgcgctctccatatcattttgtctgtatgccaccatagccatatcaaacgctgtgcttttcatattattctccttgacagcctttgctgttatttttttattataatatatttaaaacaatgatagcaatataacttctttcccaatttatagtaaatgccgcacccgaaggtgcggcatctaagaggtttataaaatgtttagtttaaaagctgttttagttgcaagctctcttcttgcgatatgtagctgctgtgattgcaaccattgcaagtccgagtaagcatacatatgtagctgcttcattgtcatcgccactctttggagctgcttttttagtgtcattctgctgtttacctgcagttttcttatcaagagtaattaatgttgcagaaaccttttccggtgttggatctgtcttgcccgggtcttttgttttcttcacctcagtaagaatgactgttccaccatcctttgctgccggaattgtaacagcaactgttttatcacttcctacagtatatgtagcaccgctgtataaatcctttacctctgttcctgctgctaagctaaccggaacttttacttcttttgcggtatccttgatattcataccaacatataaggttgttcctccataggatcttgaaactacatcatagccttcctcatcagaacctgccacaactgttctgcttcctcttgcaaatacatctgtgtatgcattacggatgctaagcagattcttataatgctgatatgtgacattgtcctttgttgccttagagaaatccatgtcatatctattagtctgatatggataattatttaatccgcttaaaccaacttcttcaccataatagataaccggaataccctttgcagtaagctgtaaggtagctgcaactaacgctgctgatgttgcttcatcctcggtatagccttttccgtttattaaggaagccttaaatccatcttcatcatgactgcttaagaactgacctgtcatgtatgcgttattaagtgctgaatttcttgcagaaaggaatttctctacagaagaaatattgccacttacaaagcttgttgcctggtcattaaaatcgaaatcaagatctgcatccatctgaccactacctaaggtactaccatttgacgcatatcctgcaccataatattctccaatcatcttgaaagacggatttacttctgttgtagaatttttaagtgctgcccatgttgtactgtcaacatgctttacagtatctacacggaaatagtcaacaccataatccttcatccatgatgtctgccattctactaattttgccctgacatctgccttttctgttgcaaaatccggcaatccagactgccatgatttaatatcgccttcactgacgctcttatccctaagcatatcagcaaatgttgattctgtaccatatcctgcatggtttacaacaatatcaaccataatacgcataccacgtttatgtgcttcgctaatcatagttttaaattcttctgttgtacccattgtaggattcaattttgtaaaatcacttgcccagtatccatggtatgctgcattataaggaacatcttctttaccctcatctgtcacagttacacctgcaatattctttacaattggtgtaagccagattgtatttactcctaaatcctgtaagtaatctaacttagctgttacaccggcaaaatctccaccatgatacagtccagggttgtctccgtatgtatctgtaccacttgctgtattgttagattcattaccatcaaagaatcggtctgtcatcataaagtagacaacagcttcatcccagtcgaaatcattttcatttttcttcacacggtctgtaatttcaacatcaactgtagtactgaatttattaccatactggtctgttacagtaattggtaatgtcttagtacctaatgttgtatctacagttgcagaaattgtaacagcctggagctctggctcaatcggcatctcactacttccaccaagtgaagaaacatcaatacttgcacttgcaacttcaagtttctgagtatctgtatcagcctgtttaaccttaaacttaactacattattctcattgtagttaaatgacttattcataacttctgctgtaactgttgcatttaatttatagtattcaaaatatgagtaatctgcattattatacttttcgctgtttgaattgaatgcatctacaacataatttccatttgctttgtaacgataatgtgttttgccatttgttaaaccattctttacatactcaaaacgctttgttatatcattgtatgtcattggatactctgttccgtttacgtcaacagatactttcatatcctttaaagtgccatctacaaatgcatcatcatcacgatagtagtatgatacctgttgattttctgcatctacttcatagccagtgttatatggcatagcaatttccggctcactgccggctttcatgctggcatagataaccttctgatcagaagggaatgtaactgaatggtctccaccatctttaatccatgggtcacctgttgaatctaatgcaatacaaaaatcaacctttgtgcaagatggttttgctgggattgttactgtccatttatctccacctacgtatgtaaaatcggttaatactgaagcatatcctgatgaccatgtataaaactgtggtgtattacctttttcttttaatcccggattctcataatccaatacaaggtatctcttttccgttggtacgattaccggtttctcatgaaccggatcggaaccatccacataatataatacctcattctcatcaccgcttattgtaaaagaacgatctgcagtatcagagccgccatcccatccttttgtattatcatagcgtgcctttaatcctaccgtttttcctacattactgccggcaactgtaatggtctgtttaaaccatgtcactttattttcagcatcataatatgttccgtcaaaaacataggaaccgtctaatccggcattccacatccacaaatcaacttttcccatgtctgtgtctgttgataaatcctcattgtaataataaatagtaaatgtgtggtctggaaccggtgcctcccagctgtccggtgctgttttatatacggttgtatcaccttttgttccggtaacccagagctcagtactagttgatgtcacagaaacatcaatattatccgtctgtgttccgttgttattattaaaaatacagctgaaattctgttttacatcctgtgtatatactacatcataccatcccaaatgatcagcatttgccgaaatctgtccgcccggccattcttttccaacacctgctcctgttgcagaggcatctgctccccacatataattgtaaatagtacttcccattcctgaagcaagataatgaatggttgttacatatttccaatcggcaggttttgtctctgacaaagaaccatcgaaccagtactctgcttctgcctttccttttgtagaaagtgttacgtcgcttaactggtttccatgtccatcatcatttaagataagattataatctgtactgttatctaatgtcagatgcattgtataccagccttcatgtcctgctgttgcagtcatggtttttcccggccattcacctgccggcttattagtctccttatatatatatgctgcaacatcatcgcctaatgtgctcttataattaatagtcagatcacattctgttggtacagactccggaatcaaagtttccttctttgaagcatccttataccactgatattttccattgtcatccaataaacaataaatgcttgtatcagaagtaaaagtcttaatctgctcaattgcagctccttctgtctttatctccggtgcagactcatctttagaacctgcatcaacaaactgaaaacctgtccactcactgctctgtacatctacataatagagtccagaactttcctcatatgcaagctttggtttttcctgattcccccattgtgaaatggtggcatttcctgcgccatggttatctaccgcagcaccggcagcccagacatggacaaccggtgtattccatgtacttggtttgtccaaatacaaccggattgtcgggctagcagcatatgcagtggttgcaccaccgattgctggaatcatagtcataatcatagcaagcgcaagtaccatactaaagatacggcttacaatgccatttttcctgtgaaaacgttcttttaactttcccatatttcctctccttttcttattatgtttgtacgaaaatcccctttcgcacgttttcgtatttatattatagtcttttcgttggttttcgactattgggataaacagagattttattcacgtaattttggtaaaatttactatttattcatttttatgtaatatatgcgaaatctttttagtactaagagtcctagatatagtagataatttttcatttgaaattttgtgaattatttttttagctatttccggttttattcgaaatcccggagctgcactgatctttgaaaggaaagttctcacattgtttttattgaaggaagcttttacttttcctgtgtttttttcaaatgaaaaggcacggacaagaagctgatattcacttacatcatcataaccaccgttgcatttttgaagcagacagtctgcgtccaacaaaattgtctggagacgctggttataatcttccttcctctgccggtaaatcactttattgtaatcagccggatcatagtaatgctccaaccggtgtatttggacgtgattttctccattttctctacatctattgtaccacttataaagaacgaatttatggttatgtgaagttttcaaggtaccaatttatggtttacaagggattgataaatcccaaaacagcacaaaaatatgaggattatggcataatggtgggctttaattatttcacaaaaaagagcccgcacatttctgtgcaagctccttttgaaatctaaaaaaatataaaactataaaaaagtatattgttttttaattatatatttaatctctaaatcaactatccccagatgatttcttccttggcggcctccacattttcctcagaatgctccacttcctttgagaagatccttgccacctccatctggtcctctatggtgaagctgccaccgtttttgtagaagcgagtggcattcatatccctgactatcatggtaaacatgacgcttaaatatgcataaaccatgatatttgagtcatagatggcattcatgatatatctgaaggtaaagtatacaagaagctgctcaatatcgttttcacggtaatcgccgctagtcatgtactccttcatgcgtttttcataatcagcctctgtaaggactgtctgcatatcatccttgaaatcctgccacacctggcgcaatagttccatctcattgatgataccgaagcggatatcaaaatgctcaaatgaaaaatcattaaacgaaagccagtctatatgcttttcaacatcgttttggctcagcttcttctggtactcgtttgccctgtcaagatactcatccacgcgtactccgattggctttgtcctgtcttggagtatagcgatcagctcgcgctgcacctcctcaaaaaaggcagcctcctcctctgtgactccctggtcatcatcgctgtcgccaaaaagctcctgctctacaaacttaacaggctttgttttgctgaaaaatatacggcagacctcctcgcacgcaaggctcaggcacttctgctccacgtttctgtactctatgccaaaccttggaaaatcggtgcacacctcactaagcgatgcctcgccagctgctatgtacaaatcacacagattcttgtcgtttagcatgatgcagcgaccgcaattgtttgtacggatgccgtgcccgccatcctccgtctcatacatgccctttctcagacgctctccgacctctccgggcagtgtctgataatactcatatgaatcctcatcaatatcaatttcccagcccagacagcagctatccttgcagtctccggctatgcagctaaactctgaaaaataatcaggtacacggactatcatacttctctctccttcagtaaatcttcgtttgttgtatcactgtgcttatttctgaagcgcgcttctatagccgcccagtcagggtcctcatttcccttaaaaaagttgtagcctatgtatccgatgcaccacacaagccctgcaaatgtcgtagaaaatgctatctttatgatactcttaagcaagagtggaagtgtcagcatatcattgccaaatgctatgataatcacatgaataggcttaatcagcataagccagcctcccacataaagcgccgctaaaattccaagcgcatagcacagtattcctaataatttgtcacattttttcttcatttcaaatcctcttcttaaaacccgcttatcaaagattcttcttaaatccgcttatcaaatcttcttttctaattacaatacagcaatttagtcacacataacgatttatattttcgtaaattccagtatagacacttctcctgttgctcttgtcttctccatgtctatcacacgctggtttgcagagcccttgaatttgagcgtgatatccttcttttcctctataaacggaccatctaccaggacatctatcatagataaaagctcatccgtatactctgtgtgcttgcgtccgttttctaacagttcttcgtaaagatagcctgtgtaagcccacacatccttattgggatagcgctccttaactcttctcataaacggcacaagtgcctcctgattctcctcctcaaaaggatcaccgcctaaaagggtaattccctgcacataggcaggcttaagcgagtcgagtatctcgttttgtatctgttcatcaaacggctctccatagtcaaattcccatgtctgcggctgaaaacagcccttacagtgatttctgcagcctgatacaaaaagcacagtgcggcagcccagtccgttcgctatgtcacaatattttattcctgcgtagttcatactttttcctcgtatctgagattatagttccatttaaaaattgcactgcctattattataacatatcctatcacacttagatagtccggtatctgttgcaaaaagacaaagccaagcagagcggcaaagataacctgcgaatagtcgaacaccgatatctcctttgcaggtgccttggtgtatgcctttgtgattgaaagctgtccgcctgtagcggctgctcctgcaaaaagcagcatgacaatctgatatacactcataggctttgctccgacaagcagaaacggagccgtcactatacatgaaaataccgaaaagcacatgactatcacaggtcctctctctccctgcttaccgagttttcgcacaaatgtatacgctacacctgcgccaaaacctcctattacaccaatcatggcattaaaaaactgcacattcatagatggcttcaccacaaaaacagcacctataaacgccgtcaccacgcacaaccactctgtcttgtttgctttctccttaagcacaaaatatgacatgattatggcaaaaaacggtgacaatttgtttagaatattggcatctgcgatggccagatggtcaactgcatagaaattgcatataagccctgttgttccaaagaagcttcgcagaaaaagccccttccagctatccttttttattttgaagccttcatcactttttgcaagtaagataacagccgctactgctgctaccgcattcctgaaaaaggccttctgcatggtcggcaaatctccagacatcctcacaaaaaatgtcatcagggcaaaaaagaatcctgccattatgatatatattattccttgtttcttatcgttcatacttatagtataacgtattctgtcaagaggggataaacaaaacgtctgccattttgctcgcaaaaaagaccgcccggatgagcggtccttttaagatgaatggaaaaatataaaagaaaatagttttagttaatggtctgtatcagcccttcacacttcccatggcaacaccacctacgatgtgctttgaaagaataaggtaaacaactattacaggaaggatagagaatgtaatcatcatatatacctttcccatggctcagcttaccgacttcgttcctatgggctctacctgcgagatcaattagctcacattgaaaaacacatctgataagaaaaaagacttttctgttttctcatatgtagagttttgtctgtggaatgccatggatgacatgaccaacttccagcgtaacttctctaccggagaggttgagattcacgccggtggctcccagctctttcacaagacagaatacagagaacgccgcaatcactatgctgtatatgctgtaaatgcctctgttgacggatttgacacagacagggattcattcttaggtgcctacggcgaaaacagcgctccttccgttgtagtaaatgatcagtctaagaactctgttgcaagtggctgggctcctgtcggctctcatcacctgaaggtagctcttgagccgggcgaagaaaaaacatatatatttgtacttggatatgtagaaaaccatgtgaacgaaaaatgggttggacgcgctgaatacggaatcataaaccgagctcctgccgatgcactccttgcaagatttgacaccaccgaaaaagccgacgctgctttagcagagcttaaggcttactgggataagctgcttggccactttaccatagcttcatcagaggaaaagcttggccgcatggtaaatgtatggcatcagtatcagtgcatggttacctttaacatgagccgctctgcttcttattttgaatcaggcatcgggcgaggcatgggctttagggattcctgtcaggatctgcttggcttcgtgcatctgattccggacagagccagggagagaatactcgacattgcagccacacagtttgaggatggctctgcttatcatcagtaccagcctctcaccaaaaagggcaatgccgacataggctcaggctttaacgatgaccctctgtggcttatcgctgctgccgctgcttacatcaaggagacaggcgactactctattcttgacgagtcaacaccatatgacagcgatccttcaaaggcaactgactttatggagcatttgcgccgctccttcaactatacaatcaatcatctcggacctcatggtctgccacagattggacgtgctgactggaacgattgtctgaacttaaactgcttctccgaggagcctggtgagtccttccagacctttggaccatctgaaggacctaatgccgaatctgtttttatcgcaggcatgtttgtaaaatacgaaaaagactatgtaaaaatctgcagacacaagggactttgcgacgaggctgatacagcccaaaaggctattgaacagatggaaaagacgcacctaactttggtgaagcaaagaacagctggctgacaggtactgctgcatggaccttcctggatgtctcacagtacatcctcggtatccgtcctgactacgatggtcttatcatagatccttgtattcctgacactatggacggctttacagctaagcgtaagttccgtggcaatacttaccacattacggtcagaaatcctgctcacgtacaaaagggtgtgacaaagctcatcgtggatggtgctgctattgatggcaatatgattccggctattaacggaaccggacacgatgttacagtcgaggttacaatgggttagagataccagacggcctctgtactgcttcaaatatgacctggaatacaaaaatgccgccgtagagtaagctctacggcggcatttaaactgctggtgatattcttcccatgtctttatttcttctccaaaggatgctgttatgtaattgagacctgccacatatgctcctcggtctctcccatgtgaaacagctccacagtctgttcatcatgagtatcatcaggctcatagttgccaagaagatgtatgagatacttctcctgctcatctgatgtagagaccttatcaatgtgtttttgcaattcctcaagaagctgttttggctccatgtcggcatcgactgcgattccaaagcacttcttcgcaagacctgctgtataatacagctcgtagttacttacaagcactgatttctggcgtaagcatttaagtatgatgctttgtctggctattgatgtaatcatattattcctttccgagttagctggaatacctctaagtccaagttatttccattataccctatttgctttttgtttcaagagtataacatgatatagctaaagataacttaagagagtcctatgaagtggcaacaaatcccgtcaggaaataataaagtgctcccattgcctttccaatagccatagaaatcactataatcccaagaccggcgcgaagcttcatgcgcttatatataatagggaatgtatgcagtatttctgcgagtgcaactgcaatacagccgacaaatattccgacacacaatccaaatattgcaataattatattcccacagatgttgcttacaggtactttgggcatatttgcaaagcccagattatatgccgtatcaagcactgacgatatattacctgccaccacaccacatatcatgacattttctataagtattatattttctatcctgctgcaccgaagtatgcgcggcaccactcctatcacgagcacgaatgcaaatacaccggctgacactcctgcccctgctaaaaacgctatcactgacaaaaatatttcacgcaatatatattcaaacatcctgcttttcctttaccttgtctattattgtgttccatgtatccttattatgcttatccatctccacctgaatcggtgtgacatcgtcggatagcttacgctttccgatatgattaaaaaacagtatgattccgaccgccagaccaatgcagtaaaatacctcaagcaccgacacctgtggcttgtccacacccattatctgcttataaaaatgttcaaacacacctgatatcgaaatatcattattgaaagccatgattgtaaaagctgaaccaaaaaatataagtatacacaccgctgcaacctttagtgcttcaagaatcttatttttgctgttgtcgtcatactctacaagtacctccggctcaccaatgcttataacctgtgcatcatcatagatttccgtgatttgctctattattttcattacagatatcacgctctttttaccgcgtatcttatccacgattattccctttatctgtccctcatagcgtgaatatttacaatacacacttgctatgtcattgatgcagacctgcctgcggtgaagtgttttctgcttttctgcgcgtatatacacgagaattttttcttttggggtatcagtatgctccggcatcttcatgctcccttcgattaatattcatatgtatataatttccatttattttgattttatacacaaaatacacacatgtaattgaatcaatatttttcgtgcgatatattgtttttttcgtgcaaacatcataaaataaatataattaatctaaagagtgaggtaacaaatggcatacactaaggaaatactgactctcgccgttgaaattggcgactgtatgctcagaaacggtgcagaaatctacagagtggaagacactgtggttcatatactaagttcatatgaggtggaggaatttgacgtatatgtgctgtcaaacggaatatttgcaagtgcaaatgagaacaaagaggatgcctgcagcatcgtgcgccacgtaccgcttggtgctgtcaatctggcaaagatcagcgcgttaaaccagctcgcaagggacatatgtgaccagaaaatctccctgattgactcatgggacaggcttgagcagtgcaaaaatatccctaattacaaaaaaagcgcacagattttcttctgtgggctcggaagtgcctgcttttgctatctttttggcggaagctggcttgactttgtttttgcatttgttataggctcactggagcaggtgcttttgtttggtcttaaaaaatataagttcacaaggattataaccaatattcttgccagtctttttgtgacactgcttgccaccgcaagtacacttacagggctttctcttttacctgataaaatcattataggagctatcatgccacttgttccgggaatagcatttactacatctatcagggatatctataacggggattatctgtccggtacaatacatctgctcgatgcactgattacagccgtgtgtgttgctgtgggagcatgtctgccgtttgttgtgatgaaatatattggagggctttaagctatggagtttataatacaatttattgtggctctctttgccacattatcgtttgcagttattttttccgctccaaaaaaggagctgttttactgcggttttacaggagcgcttggctggatcatctactatataatggttcagtttgatatgggtgttgtgtttccatcgcttatcgcgacactgtgccttacgataatggcgcgcatttttgctgcggcacgctctatgcctgtgacagtttatctgctttccggtatctttcctcttgttcccggagcaggaattttttacacggcatattatctttttacgaatgacagagcactttcttcctcaaagggtattgaaacctttgaggtggcgggtgccatcgtgcttggtatcatattcgggtttggcataccgcagagtttgtttaatctgttgaagcctaagaaaaaatgaattacttgaactatgtcaaatttgcaattttctgcgccagatcctcgagatactcccaacgctccattttctccatcagctgcccctcgaggtcttccttttcctttgtgagctcgtttaacttaccaaagttagtggcattctttaccatatcatcatctatctcagaaagcctgttttccagcttttctatgtcagcctctatcgtctcgtactctttttgctctttgtaggtaaatttgagctttttctcatgcccccaggtttccatggatttcttcttccgggcttcttttgagtctgtaccatctgatgcagtatttccctgtgctcctgaagcggatgctcctgtggatgatgcattttccgatacggtttttcctgatgcaggctgtggacgtttattcatatagtcggtgtatccgccctcatactgtacgatttttccggctccctcaaatgcaaaaatacgctttgcaatcctgtcaaggaaatacctgtcatgggataccgtgatgactattccgtcatagccatccagataatcctctaaaatagccagtgtctcgacatccaggtcattggtcggctcgtcaagtatcagtacattcggtgcgctcatcagcacacgaagcagatagagtcttctcttctctccacccgagagcttgcctaccggactgtactgctgctccggtgggaataaaaacctctcaagcatggcagatgctgacacaagtccgtctgccgtgcgcacaaactctgcagcttctttcacataatctatcactcgaagctcaggatctatatccacttcctgaccgaaatatcctatctttatcgtctgtcctatctccacctcacctgaatcaggctcgataaaaccggcgatcatcttcatgagtgtggactttccacagccgtttttgcctacaaaaccgatacggtcatttttcaggaaaatatacgtgaaatcctttacacagacgatatctccgtacgcctttgaaatatcatgaagctctatggtcgtccttcccatacgtgatgaaaccgatgaaagctcaacccttgcgtctgtctgtggtcctttctggtctcgcagcgcctcatatctttgtatgtgtgccttctgctttgtggaacgagctcttgcgccgcgctgcatccactctatttcttttctaaggatggactgacgcttgcgctcacttgccctctcactctcctccctggctgccttaagctcaagaaagcccgagtagtttgtatcatagctgtaggtctgtcccttgtccacctccacgattctgttgcagacactgtctagaaaatagcggtcatgcgtaatcatgatgattgcacccctgaaacggcgcagataatcctcaagccactccaccatctcgtaatctaagtggttggtcggctcgtccaatataagcacatcacacggcttaagtacgactgttgcaagcgcaagcctctttctctgccctcctgaaagctcaccggtcttttgcgccatatctgtgatatcaagcttcataagaagtgactttgcatcactttctatactccagcgcatgtcctcatccagctgcgaggtaaccacacggcccatcacatgttcaagtgctgtctcgtccgggtcaaactccggattctgcggcaaatagtttatcactatatgatttgctgtggtgacagttccctcatccggctcttcatcaccagccacaatctttaaaagtgtagactttcctgtaccatttatacctatgataccgattttttcgttttcctgcacataaaaggaagctttagaaaaaagcttccttccagtatatgactttgttatattttcgacattaatgatgttcatcttctcgtattttctcctccctctcatgctcctgcttctccttggcctcaaggattgcctcattgagcgaaagcatctttgcatcaagctgtcctacgatacctgcacactcgcgcagatcgcggctgatatactcaggtgcattgccctcgaacttgtaatatatcttgtgctcaaggcttgcccagaaatccatagctattgtacgaatctgtatctcaacctttgtgtcctccaccttgtttgaaagaaaaataggcaccgaaacaatcatgtggtagctcttgtagccgctcgccttcggatgcttcatatagtcctttaccgatatgacagtcaaatcattctgcctgccaatcatctcagcaagccggtatatatcagatgtgaacgagcacacgattctgatacctgctatatcctttacatatgtgaccatattctctatggtgctctcgtagcctccctttttgagcttctttactatgctttcaggagtcttgatacgcgactttatgtactctatcggattgtaattatgtatgtgaacaaactcgtcatttagtatctcgagcttagtattgacctctttcagtgcagaattgtataaaaacatcatagtctcccagctatcgatgccctccgcaaactcttgttccattaaaaacctccctgtgatctattcgcctgtatatttatcagactcttctaatcaattatagcatatttattcgcataattggcaaattatacctattatttatatattttttattcttgttattttatatgttgtttattttgtatgtgcacaggtccgcacgctgcaggcacagcgtgcggaccgtcattatatcaataataactcatcatatccataatgaggcatcaatcctcctcgatgatgtgcatctcgagaaaatcaaagtcgatattctccacaaaattatccttcgtaaagcgggtctttccatgtctcttgaaatcacttacgttgctgtcaagccagatgggctttcccaggtcaaatgcaaggcaggcatcctcaagagccttaaaaatcttgtgtgtacgtgtgtcgtcactgtcattttctattgtaatatcacgcatcaggtgcgtgtcagtataaatcttaaaccaaatacgcatattattctcccaaaagccttctctgacgattgcactcatacataagcaaagtggctgatattgcggcattaagcgactccacagctccctccatagggatgcggatatatatgtccgccatgtcagctatctcatctgataatccattaccctcatttcctatcataaagccacaggctccggtgtagtccggtctgtcataagagcacttaccctttaaatgagctgcgtagagagaaactccctttgactttgcatactctatagtctccggaaggtcatctgtgatgtaaaacggcacacggtagagtgagcccatggttgagcgcacagtctttggattaaaaatgtccactgttgtgcgattcattataataccgcttacacctgcgccctcaccggtacggatcatagtgcctaagtttcccggatcctgtatactctcaagcacaagaagctctgtcttgtcgcccttaaaaagttcatctatctcatagtgcggcatctttactatagcaagcacaccctgcggagtctgcgtgtcagacatgctcttaaacaccgagtcactcactatttccgttttatcaaggaaacgcttcttctcttccttaaacctgtcatcataaaaaaatgactcagacatatatacggcacttacccagtcatatggcgcctcaaagctcatctttggaccctcaaccacgaatacgccctgctttttccgctcctttgccttgcttaaaagagcctgcacattttttatgcttttgtttgatgcacttgtaatcattttcttctctttctatattgatgatatgagtgtcaaaaagtattttgcccctcatttatgattaacattcgtctttctccgaatgcataaatgcccctgcaccggcacatcaaatgcacgcaattacctgcatttgatgtgccggatacaagggcattatatttatcgtaactatattagatactaaaccagagatttagagatatcgtacatgtactcgtctacactcttcttcatagcaagtgcctcgtcgatatcgaaatctacgaaattgccatccttgtgggcaataactctgtttgacttgccctcgcagagtaaatcaactgccatagcgcccatgattgtagcgtatacacggtccttgcatgaagggcttccacctctttgcatatgtccaaggatagttgctcgagtctcgatgcctgttgcggcctcaatttccttagccatctcctgtgaatgtcctacgccctcagcattgatgatgatgtaatgctgcttgccgagctctcttgcgtgagctactctctcgatgagtgcctcaaggttgttgtcatacttctcaggaagtaatacttcctcagcgccgtttgcaagaccacaccataatgcaatgtatcctgctccacgtcccataacctcaatgattgagcatctctcatgtgatgtagatgtatcacgtaccttgtcaatagcctccatagctgtgttgcaggctgtatcaaaaccgattgtgtaatcagtacatgcgatatcaaggtcgattgtgcccggaagaccgattgtattgatgccaagtgcagcaagcttctgcgcaccctggaaagatccgtcaccaccgataactacgatagcatcgataccatgcttcttacagatttcagcgcccttctgctgtccctctgctgtaacgaactccttacatctggctgtctgtaagattgtaccaccgcgtgagattgtgtctgaaacgctctttgaatccatatccacgatttcttcatttaacagacctgcgtatcctctcttgattcctttaaccttcttgccctttgagagagcctgacgaacaacggcacgaatcgctgcgttcattcccggtgcgtcgccaccacttgtaagtacacctattgtgttaatctcttttgccattggtataacctccatatgttaaaaaattatcatttattctaatcccaatctattgtacttgttttagcacattttttcaatattcttttcaacaattttcgcattttctttgtctaaaaattccaaaagctgctccatgagctcattatttgcatttacggaataatttctgccaagttttttcatctgctttgtatctgcgatgtaaattatgacctcatctcctccgtcagattcacggattgtctcaagaagcctgctctcatttttcttatagtcctccatcgtatcaaacctgagccatagctgcttcggaagctcatcaaacggtatgattctctcgcagattatcttgccgttctgctcatcctcgactgtcgcatgtccgataacaaatattttagcatcgtcctgtaaatatctctggtagcgctcgtaatctctcggaaaaataattacctcaacagttcctgtcaggtcctctatcgtgataaaagccatggcctgattgtacttggtaaacttaatcgtctttgtggctatcatgcctccgatcaccacgtgcgcattgtcctttatctttacagcaccgctctcctcttcaagcacaaaatctatcgcatttgctgtgatgtttttctttagggcagctgcatatttttccagagggtgtccgcttaaatagatgccaagcacctctttttcataggccagggcttcctcagcgtcatattcaccaacatttggatacttaagctcaaatgactgcctatcctcatctgagaccaggtcaaacaggctcatctgccctgccattgttgactttttgtcatgctgcaccctgtccacaatcgatgcatacaccattgccatctgctttctcgtgccgtcgagtgaatcgcaggctcccgcctttatcagattctcaatcgcacgcttgttgataagctccttctggcaggttctctcgataaaatcagagagtgtgcggtatctgccaccactttcccgctcctcgattatctggtctatgaccggcctgcctagagatttgatggcgtacatgccatatctgacatggtcaccctctgcggtaaactcgccctgtccacagttgatatccggcggaagcaccttaatacccatatcacgacagctgtaaagatactgcgccgccttggctgaattgtctataacagaagtcatgagcgctgccataaattcgaccggatagtaatttttgagccatgccgtctgaacactgattttcgcatacgcggctgcatgtgatttgttgaacgcatacttagcaaaatcaaccatcgaatcgtatatgctgttggcagccttttcatctatgccgtttgccacacatccctttataccgcgctcctcgtctccgtacacaaagctctggcgctctgcgtcaatgacatactgcttcttcttgctcatggcacggcggatgttgtccgcctgccccattgtatagcctgcgagcttctgcactatctgcatgacctgttcctggtatactatacagccgtaggtcggctctaaaatactctcaagctcaggtgtcacatagcttatctcctttggattgttcttgccctttatatagttgggaatgaaatccataggacccggacggtagagcgaaataccggccacgatgtcctcaaagctctgtggactgagttccttcatgaagctttgcataccggcagactctagctggaataccccttccgtctttcctgttccgataaagtcaagtgtgcccttatcgttgaaatcaatatggtcgatatccacatcaatgccccttgatgccttgatattcttcacagaatcctttagcaccgtgagtgtacgaagccccagaaaatccatctttaaaaggccaagctcctcgagctgtaccatgttgtactctgcggtagggcttccgtcgtttgcccttccaagaggcacataatcgctcgccacacccggatagattaccacacctgctgcatgcacggacgtgtggtttggcagtccctcaagcctttttgccatatctatcatttcatgcactctcgcatcactgtcgtaaatgcccttaaactccgggttcatctgaagagccttgtcaatcgtgatattaagctcctgaggcaccatctttgcaagcctgtcagtctctgcatatgggaaatccagcgcctttccgactgattttatgacacctcttgctgccatcgtaccaaaggtgactatctgtgttacagaatcgtgtccgtacttctgctgaacatactctatggcgcgatatctctccgcatactcgaaatccacatcgatatcaggcatggaaactcgctcagggttaagaaatctttcaaaaagcagattgtatttaaccggatcaatatccgtgattccggtacaatagcacaccctgcttcccgccgccgagcctcgtcccgggcctacccagcagtcgtgcgtgcggcaccagttaatataatcccacacaataaggatatactctataaagcccatggtctttatgataccaagctcatagtccatatctgcatgtatctttttaagctcctttgcactgtactcgccacagcctatgtatttctccctaaagcccttctcgcaaagctctgtaaggaaggcttcggcactatcatagccctctggcacctcatactttggaatcttgtaattgccaaactcaagcgtcacattgcatctgtcggcaattttctgcgtattctcaatagcctctgtggcatatgggaaaagcgctctcatctgctcttcgctctttacgaaaaactgcccgccatcatagcgcatcctgtcctcgtcagacacctttttcccggtctggatgcacaaaagcacatcatgtgcctccgcatcggactcgtaggtgtagtgcacatcattagtacacactaaccctatttcaagctccttgctcatcctaagaagctgctgattcacaagcttctggtcatcaatgccatggtcctgcagctcaaggaagaagttgtcttttccaaagcagtcctgatacttccttgcaatctcctttgcctcgtcataaaagcctcttacgatgtatctagggatttctcctgccagacaggcagacaggcatataagcccctcgtgatatctctcaagcgtctcaaaatccactctcggcctgtaataatagccctctgtgaaccctattgacactatcttcatgagattggcatagcctgtattattttcagcaagcagaatcagatgataatacctgtcatcaccgtggcttgtctccctgtcaaagcgcgaatttggtgccacatatacctcgcagcctatgaccggattgatatcatttgcctttgccgtcttgtaaaactccaccacaccgtacatattgccatggtctgtgattgcggcagagttcatgccaagctccttgacgcgctttacatattcttttatcttgtttgatccatcgagcagactgtactcggtatgggtgtgaagatgacaaaatgacatttggattcctctttctttatttttgtatcgccgcccgcccttcatgggttatgccatccggcgggtactgtggcagaacaattcgtaagaattgcgttaatttgtcaggtgtcgtttttcggctcaaggtttgtgtacattcgccagatgcacactttcggcgcggcgtacgtctgtaactctgtcaggtgtgaacagcagcagccatagcaagcctgcatatcagatacagtacaaaaagatgcaccgggtaaaaggcgtaaaagacatattttagtgaaatgcctctttttccattgtaatagcgaagcggtataagcataaaaagtgcaaaaaactctatggtacctgagaaaagtccaagcagtatgactgccacggcaaatgcaacatctcggtttgaagaaagcaggtacatcatgacaatgcaccctacacccgccgcaccataatcacagcaaagcacaaactctgcaataatcatcataacaagcaccactgataccattactatacacctgatcagtgtgacaaaaaaccacttgactgcagaggatgccttttctattttatcgaccgacttaagccaatcaagcactgtgatggcaagcaggcctaaaagcagtgtaaaaaacacattgttgctcttaaattccagcactgtattgtttattgcaaggtcaaacggtatctcagagataagcgcgaatataaacatcctcgcagcatatttttccctgctgtgtgtatatttgaacccctccacaagcaggaagcagaaaacaggaaaggccatgcgccctatagaacgcatgacccagtagatatcaataagcgtttgtccacctatcccgttatttatcatctgaagaataaccgttgccgcagtatggtctatgagcatggtaaaaatggctataagcttaagcgtgcttccactgataccagactttgcgataactttttccaaaatcctatactcctgccatatttacggtaatcctgtcaagatgccagatatcgtccacatattcctggattgttctgtctgaagaaaactttcctacatgtgcgatattgagcagtgcactctttctccatgcgctcttgttcttgtaataatcattaatcttctgctgcgcatttgcatatgagcggaagtctgcgaggataaagtagcggtcagccacctgtccctgctgtggattgagcagtgagttgtaaagctccctgaaaagctcatggtcatttggtgagtatgtgccgtctacgagctggtttactacctttcttagctcggcatcgttattatatatatcaacaggattgtagtcatgtctgttctcgtgtgagatgacctcatcagagctcattccaaagataaacatgttgtcagcccctacctcatcgaacatctcgacattggcaccatccatagttccgatagtgagcgctccattgagcataaacttcatgtttcctgttcctgatgcctccttgctcgctgtggaaatctgctcgctgacatctgctgccgcaaaaataatctcggcattggataccttgtaatcctcgataaatactaccttgagcttgccgccaatagaagcatcgttatttatcacatcagccacactgttgataagctttattgttttctttgcatttctgtagcctgctgctgcctttgctccaaaaataaatgttctaggatagaaatccatagacggattttccttaatcttgttgtacagatacatcacatgaaggatgttcatgagctgtctcttgtactcgtgaagtctcttaacctgcacatcaaagatagaatccggatttacatcaataccattgtgctcctttatatactttgctaaacgcaccttgtttgctctcttaatctcagcaaactcctgctgtgcaacagggctgtccgcataagcattgagctttgaaagctttgtaagatctgtaatccagccggttcctaccttttttgttgcccagtctgcaaggagtggatttgcatgtgctaagaatctacgctgtgtgattccgtttgtcttgttattgaacttctcagggaacatctcatagaaatcatgaagctcctgattcttaagtatctctgtgtgaagctttgcaacaccgtttacagaatagcctgcaacgatagccatatttgccatcttgacctgtccgtcatagaggatagccatctttcttaccttgtcctcattgccaggatatctctcgttaatctgaatcacaaatcttctgtttatctcgtcaacaatctggtatacacgaggaagcagtctctggaatatctcaattggccacttctcaagcgcctcagccatgattgtatggttagtgtaggctacacatcttgtagtgatatcccatgcatcatcccatgacagatgctcctcgtccacaaggattctcataagctctgcgactgcaactgtagggtgagtatcgttcatctggaaaacagctttatttgggagatcttttaaatcgctgtgatgctttttaaaccttgcaagtgcacgctggatgcttgctgatacaaagaaatactgctgctttaagcgaagctccttgccctttacatggttatcgtttggatagagcacctcaacaaggtttcttgcaagattttcctgctccactgccttgtcgtagtcaccctggtcaaaggactcgagcgagaagccgttttttggctctgcatcccatatcatgagagaattgaccacattgttgtcataaccgactataggcatatcataaggcactgcaagcaccgactgatagtccttctgctcgaaatgaagctctccgttttcatctgtgctctcctgcacatatcctccaaacttgacctcatagcagtactccggacgacgaagctcgaatggatatccgtccttgagccagttgtcaggcacctcaatctggaagccgtctgaaatctgctgcttgaacataccatatctgtatctgattccacagccgtatgcaggatatccgagtgtggcaagtgaatccatgaagcacgctgccagtcttccgagtccaccgtttccaagtgccggatcaggctcctggtcctcaatagcattgatatccacaccaatctcagtgagagcctccttgacctccttgtatgctgagaggtttataaggttgttgccgagagctcttcccatcaaaaactccatggacatatagtaaacaacctttggatcgtccttgtccatcactctctgtgtggcaatccactcatccatgatgacatcctttacggcctctgatacagcctgataaagttcctgctgtgtggcatcatttatagtcttacgatatttattttttaaattgtctgatacagtcttaataaacacctttttgctaaacgtattatctctcatcttttcctccttatggcactaaaagggagcaaattaatgctccctctcgtgcagagattattgtttttcaactgcaagcttaacagcctcgccattaatcttccaatccttttcatagcccttaagttcgcctgatttaattgatacggcaagaacctcggtcttgatttcatcaccaaacttttcaaatacatttgaaagcttctcatctgcctcgtatgtcacagcgatgtggtccataacctcaaagcctgcgtccttacgcattgtctggatcttactgatgatttctcttacgaaaccttcctcgataagctcaggagtgaggttggtgtcaaggacaacggttatattgttgtcagattgtgtcacataaccctccatctgagtcatctcgataagtaaatcctctttagataatacaacttcatcgctaatgctgtcaagcttgagagagccggtgctgttaagctcctccatggccttatgaccatcaagctcagctaaaactgccttgatctggccaaggtatttaccatacttaggacccactgttctaagctgtggcttgaatttgtaggtggtgtagtgtgatacatcatcagtgaactcaacctcttttacattgagctcgtctgcgatgatatccacataaaattcatccagtttttccggagcctttacaaacatttttccgattggctgacggtttttgatatttgcctcgttacggcatgcacgtccgagtaccacaacctttagtacctcatccatatcagcttcaagctttttgtcaatcagcttctcatcaactacaggatagtcgcacagatgaattgactccggtgcgctcttgtcgatagagcagacaagatttctgtagatatcctctgtcatgaaaggaatcataggtgctgccgcctttgatatggtgacaagtgctgtataaagtgtcatgtatgcgtttatcttgtcctgctccatgccctttgcccagaaacgctcacggctgcggcgtacataccagttacttaagtcgtctacgaactcctgaaggtactttgccgcctccggaatcttgtagtttgacaggcactcatccactcctgccactgctgagttgagctttgaaagaatccacttgtccattactgcaagcttatcatactcaaggctgtattttgtagcatcaaagttgtcgatatttgcataaagcacgaagaatgcgtatgtgttccagagtgttcccataaacttacgctgtccctcaagcacgagctttcctgaaaacttctttggaatccatggagctgatgctgtgtagaaataccatctgatggcatctgcaccgtatgtctcaagtgcatcaaacggatctaccgcgttgccctttgacttggacatcttctgtccgttctcatcctgtacgtgtccaagcacgatgacattctcataaggagccttgttgaaaaggagtgtagactcagccatgagtgaatggaaccatccacgtgtctggtcaactgcctctgagataaacttggctgggaactgcttctcaaatacttccttgttctcgaatggatagtggtgctgtgcaaatggcatggctcctgaatcaaaccagcagtcaagtacctcaggtacacggtgcatatccttgccacactcaggacacttgattgtcacagcgtcgatatatggtctgtggagctctacctctgctgcctttggatctcctgctttttcggcgagctctgcacggcttccgatacactctctgtgtccgcattcacactcccagatattgagtggtgtgccccagtaacggttacgtgagatagcccaatcctgtatattctcaagccagtttccgaaacgtcctgaaccgatagactcaggaatccagtttactgtattgttgtttctgataaggtcatcctttactgctgtctccttgatgtaccatgactctcttgcatagtagataagaggcttgtcacatctccagcagtgtggatactcatgctcaaatttcggagcatcgaagagctgctttctgccgcttaagtcctttaatacctcaggatctgcatcctttacccacataccggcaaacggagtctctgctgtaagctctcccttgtcgtttacaaactgtacaaatggaaggtcataatttcttccgacattggcatcatcctcaccaaatgcaggagcgatatgaacaattcctgtaccgtctgacatagtaacatatgtgtcacatgtcacgaaaaagcccttcttgccctgcttatcggcaacctgcttagcgcagtcataaagcggctcatactccttgtactcaagatcctttcctttgtatgtctcaagcacctcatatgccttcttgcctgcttcggcgtcctcttttgaaagaagctgtgagagcaccttgtctgcaagtgcctctgccatataatatgtgtagccatcaacagcctttacctttacatatgtgtcattagggttcacacagagtgccacgttacttggaagtgtccatggagttgtggtccatgcgaggaaatatgcatcctctcctactaccttaaaacgtactactgctgatttttctttaactgtcttgtagccctgtgccacctcctgtgcagaaagcggtgttccacaacgaggacagtaaggaacaatcttgaagcccttgtaaagaagtcccttgttccagatttccttgagagcccaccactctgactcaatgaaattgtcgtcatatgtgacgtatggattgtccatatcagcccagaaacctactgtgttggagaaatcctcccacatgcccttgtatttccatacagactctttacacttcttgatgaatggctcaagtccgtagttctcaatctgatccttgccgtcaagaccgagaagcttctccacctcaatctcaacaggaagtccgtgtgtatcccagcctgctttacgtggcacatatttgcccttcatggtctggaatcttggaatcatatcctttatggtacgtgtctcaacatgtccgatgtgaggctttccgtttgctgtaggaggtccatcatagaatgtgtatgtctctccttcttttctgttttccatagattttctgaagatattgttctctctccagaactgctctgtcttcttctcgcgttcaacgaagttcatattggtgtcaactttgttgtacatgactatctctccttattctatattgttcgtgaacatcccaacaggcacctcaaattcgactcttacgaggcttccttgtggcttactccactacaattttcggtttatggaatattcacaaaaaaaggcacacattcctgtaattaggaacgcgtgcctgatacgtctataccacctattacaatgtacttaagggaaatacccttgcatacccgcccctgtaacgtagggaatacgtcagaacctactctcgcaacgctgtatggcgattttagcctgcggctcagaagtgattttcaaaacggctctactcataccggctctcacctgtcccggctctctttgactttcctgccatctctactgtcttcgtcactgccttttactaactgtgtttaagtatataactgaaaagccactgttgtcaagatgtaattgattctgtaataatttgataataattaactctaataaatgccatcatactcaaaattctgataatcataatcgtcatgatcaaaagaatcataatcataatcgtaatcctcataggaatcatcatcattataatactcataaccattgtcaaagcccctcatgaactccttttctaaatctgtgcttacatttgagcctgccacaacccagaatatgatgctgactataactgagataactgctgttgctataccaactataccaaacaccttgttgttgccctttatgatatgtataataccaaaaatgatagcaagcagcgctgtcacataattgatgcatgtacaaaacagtacaatagatgcgattccaagtaccagagaagctataccaaagccattgctgttctttggcggctggttgtatggattagctccatacggcgactgattgtaggctgtctgtccgtatgcggtctgattgtagccaccctgtccgtttggctgctggccatactgcgtctgtccgtaagctgactgattaaatgagccctgagcatatgtgttctggttgtatgtaccctgggcatttggattctgattgtatgtaccctgggcatttggattctgattgtatgtaccctgatgcaaattctgctcgaacggtacgcctattccgaaatcggcggtacattcattctgatttagtggtacgcgttttctgcgcaaacgaaagggcagttaatgaaaagtctcaatactgctttttcgtttgcaccaccttcgattctttccttaacgatttaccaatttcattaaatattaaatttcacgaactaactacattgtcaaaaaattcattacaagattcaccattatatcttttttttctggtcttgactctgcaatcataagcgtaatcgcaaccaatgctggaacttttatcggaaaaaccgatagaagtctcatccaactcgcctgacgatataatattattgatatgttcacttaacgttgcctgttttacttcaaacaattctcccatttgtttctgtgttagccaaactgtttctaattctggacttagctcaacttcaatatttatatcgccatctgtaaataagaagttagcgatttctttttccggtattctctgtcccacggatttcctcatgatagaaataatctacgatcaccggatgcccctgcgggactctgccataaggcatttcattatccacaaaggcacaatcatacttcttagccattttctcagcttttacttcaagtgcttcaaagtagctgcggttatgcttgttatagatctcgtcgtaaagtggtacaagatcaggatattttccggcgatataatccataattgtctttttgaaaccgcctcgaagattgagattttcgagccaaaacagatcgcactgatcctttacccgctcaaagattgcttcaaaatccgtgataccggggaataccggggatacgaaacagactgtacggatacctgcctcatatacctgcttcatagcagagatacggtgctcaatgctcgaagcagaatccatatcgttcttgaaattttcatctagtgtgttgatcgaccatgaaacggttacacgtccaagtttcttcagcagatcaatatcccgtaccacaagatccgactttgtgcagatcagaatatctgcgtcactgccgatcagctgctccagaagttttctggtattcccgaattgctcctcctgtggattgtagccatctgtcacagaaccgatgaccacccgctgtccggcatatttcttcggatttttaatttccggccaatgcttcacatcaaggaaagtgccccattcctccttgtgcccggtaaatcgcttcataaaagaagcatagcaatacttgcaggcatgtgtacagcccacatagggattgaccgagtaaccgcctaccggcagactagacttagtcatgatgttctttgtttccacctcacgaatgaggattccatttattacttcttccatgatttctgtacctctaacactttattaaattcttccggcatttcctgaatcatattttcatcccctatgatagggacaatgtcttccttcataaacaccgggatgccgagcttatgtgcctggtccgccagagaccatgcccattccggctccgtatgaatcttcctgctctgagctccggtcatggtgcccacaacgatccaattgattccggaaaggtcaactgtgccgggatcgtcgaataacggctcaaaggtaacatggtaatgttttgctctaacgtttttccgaatggcgtcgatacgccacagttctgctttcctcgtcaccgtaatgccaaaccatgcgttttccagatcggtatcaaaatccagcaaatcaggtcgcttggtaaggaacaggaactgatgctgtggattttcacggatctttgcaaatacctcatctctccattccggcttccatccggagagatcgctcatcccagtaagaagaaagttctgcggacgtttcttttccatcatcttgagcttacccggaaagaattcaggggcagcgaagtcatcaatcatatgccagcgtttcacgttgttgcgggcatagcaatatgcacaccccactgtgcagccaatgacgatattcatgttctgaatctgctctttgatacaaatactcatgacttctgccactcctcaagattctttctgatgcggtcgagacattcctcaaactgggtaatttcttcctctgaaaaacctttgtagtaaatactgcccatctcatcagatacagaatcgtactcgccctttaaggcatgtgctttctcagtcagaaacagtagtgttttccttttgtccgtttcagactgaacacggcttatcagcccttgattttccattctttccagcatcgtagtaagagatgttatcgctaatccgcatttagtcgagagtgacctgattgagataccatcctcctgccacagcacataaagaatacgtccctgggctccattaaacgcatcaatattcttttcactgagaatcttctcaaaaatccggtctccaagctgttttattttggtgacaagaaatcctccattcatttccatacaaaagctcctatatagtagtttgttaaaaacatactatataggagctttattgtcaagagtttatatgtcttaataggtaaatttcgtttttttcaattctccaaactggaagttatcgctttacttttgttgtatcttagccaaaatactttctattacaagtgttactgttataaaggctcctacaagggtatagtagtttaagccatacatcaatggcaaaagagaaataactaccgtaataatggaaaggacaaacaatgctttgagaacacctttcttcttcaatgaaaacaatgaaagtaagaagatggcaacagtaagtgtggctgtaataagtggagcaaaatttgcatagccaaacggtgtaaggctaaagtatgagaatgtttcttttactctttctgttggagatgttgcaaaaatacaaactgctccaaagggtaataattctaacactattgttaaagctggcaaaaccgctaagcagactttcttcatgttgtatatctcctttacaaattatttcgtgaacaatcggcgtcaggacagaggaaaaagcagactacacttttattggtatctgcccattcctctggactgcacactgattttcaccaattgaaccaaatcgcgtccggttagccaagacactatggagtttcaatcttctttctatacctttattttaccaaagatatctggttttgcaaatctgtaaatatgatgaatcagatttttcttgctctcggtgcacgacaaataaaccttcttgttatgaaggctttccgaacatatttaattgtcctgcttatcccgtaagtgaataagaacctctgagtcggaaggataaaagtttgccaccacacttctcgcatttgcagatatctttttgatataaaatctgaagtttttcagcaacggtcttgtttcttaactttgaaaggtactgagtacagtttaaaagctttctgcataaatccattttatcttttttacttcggcaggaaagaataccatagtggcgaatccgaacaaatcctttggggagtacatgcataagaaacagacgcaggaattctgtacctttcacagtataaggaatcatcttgcccccatttttgtagtctttggcaagataagtgactgtttcggatgtcatactgatgatacgacgattgctgatagcaattcgatgggtgtatctgcccagatatttaatcactgagttagctccattaaaggcttctttggtatatacaacccattcttttgcataaagcgtattcagtagttccttgaaagtataatgatttttaagtttttgtgatgtccctaagtattgcagctttcctgattcatgaagcagtttgagttctttcaggtaatgtttcttaaatacagctgacatcacttttaccggaaagaaaaacttttttcctttatctttccaacgattggtggaatccagaccaccgccaagaactatggtgtggagatgtggatgataattcattcttgaaccccaggtatgtagcacacaaatgtatccgatttttgcaccaagatgttttgggtcagaagacaattctgtcatggtcagatgtgccgcatgatacaatgcatcatataaaagcttctgatttgaatacactaaagaatacagttcttccgggattgtaaatacggtatgaaagtacggaacatcaagtacattttcctgctgcttatcaatccattcgtcgacttccatcccctgacacatcggacagtgtctgttcttacaggaattataatgaatgtacttcttgtgacaggattcacattcgctgatatttgctcccatttcggcagttctacatttagagatacatagcgctgccatatgctgttctgttgaaaaaagatgtgtttcactatactccggaagaaattgatgaaaaacatcctgaatggtgatttcattactcattagaatcaccatcctttttcttgggtttgcggccacgttttttcttttgtggatgatctaatgggcttttaattcccataactgtttgattggaaatgtgaatataaacctgtgtcgattccagacagcggtgtccaagcatagactgaacataattaattggaacgccctgttcaatcatgtgacttgcaaaggaatggcgtagcgtgtgtggatgaacacttaatcctgcatcttttccaacagctcgaagcataatctcgacaccacttacttttagcggttcatgaggttcatccaaagaaacaaacagatagtctcttttaacagggtaacttctccaatactgctttaaaagctcaagtgcccgatttgaaagtattgtccaacggtcacgatgatttttgcttttgggtacataaacctgcattctgctcatgtaaatatcttcagccctaagctttaccagttccccaactctaagtcctgatgaatagagtaatgcaatgatagctttgtttcgaatatgtgaagcagtatcaattagcgtttccacttcattaagtgaaaggacttctggaagtcgtgcatcaattcgcattctgggaacaacatcctgatcccaaggtatatggagtacatgtttatatagaaatgcaatggaagaattgtaaaagttacatgtagttgccgagacgccactttttcttttgaaaagaataaactctctggcatcctgaaggcagagttcttccataggtttattaccagtccatttcataaaagaagcgatatttgatatataagcttctgcagttcgagaagaacggttgcgaatcagacattcttcttttagttgtttaaaatatttttcgtacataataaatcctccatgtaaagtaagtaattttaggtatcactgcttacatggaggtgcattggaataataaaaccgcttgctaaaagaacggttaagtgttaatcttttcattccactgctttttatttaggaaaagaaaaactgcgtcacagccttggcaggccatcgcgcagcgattttgttcaatttgagtttgttaagatgtggtgcacttgatggaatcacaggtacgacatcatattatggaggatgaaatagatgataggtttgattgttgcgaggtcaaagaataatgttataggcaagaatggtaatataccatggaaaataaagggagaacaaaagcaatttagagagttaacaacgggtaatgtggttattatggggcgaaagtcttatgaagaaatcggtcatccgttgcctaatagaatgaatattgttgtttccaccacaacagagtatcaaggagataatttagtttcagttaaatcattagaagatgcattattattggctaaaggacgagatgtatacatatctggtggatatggactatttaaggaagctttgcaaatagtagataaaatgtatatcacagaagtagatttaaatattgaagatggagatacattctttccagaatttgatatcaatgattttgaagttttgataggggaaacacttggtgaggaagtgaaatatacgagaacattttatgtaaggaaaaatgaattgagtagattttggatttagggtgttttcataaatatattgctttttatgcatatataaattgttgtaagacaaatcccagtttgacaatttcatatccatacacacaaagcagttagtcttaggattgactgctttttaaaaagacaccatttaggtgtaatgatgtcttttgggtgttattttataggtcatatcaaggctcattcaatcgtggtaaattcgtggtaaaatgagttttttctatacttcaaaatacttgaaagtatagtgtttatgcggataatcgaaaattagatataaaattttaactatctttttatatcttctcaaatgtccgcaaagccttattttatcggctctacgggcattttgcctttgtggtaaacctcacatatctaggcttatcttcttatattttccctgtcaatcgtggttaaaatcgtggtaaatacttctatgcaattagacgctgaacctctgattttgcggtatctatggacgcatatataatgatatgagggtcaaaaggtattttgcccctcatttatgattaatcagattactacatgctacgcattcccgtaatctgactacacctcgaaatccgctaatttcctgcgttcccgcagcaaattgctactttctcggtgtagtgcgggtcactaaggtatacatcgaattgcatgcaagcatgcatcgatgataccttttgacccttctttaggttacaatcgatgatggggtaaacgaaaaagcagttttgacattgcagagaactgccccttcgtttacaccattttcgatttgacctaattgaacaaagtgagcgtccgggtagccgcaacctatggactttcaattctttgttcctgtccatgattatatatgattctcggtatgaaagctacaacattttataaaaaacaggcaaatgggcatgacgataaaacctcagaaactgaggcttttgaaagtattagatgttgctctttagcagcgcagtggcattctcatctgtggctttccgagatgcccaccacatgccttacacacacaaactttgatgccataaagatgttccaatatttcaggcatttccatgtcacgaagctttgaaagatacttcttacatccaagtaaatttctgcaaagggtgagcttctggcttttagtacgggaacatagcagtccgtagtgcctgatgcggacaaaacgccgtggtggtacatgcatgagaaaccgccggacaaactctacacccgaaatagtcagttccttccactgtccctcattacggtaatcctttactaagaatgtaacggtatcatcatccatacggacgatgcggtgattgctgacggcaatgcgatgagtatacttaccaaggtatttaattactgtttgagcaccattgaatgtctttttacaatgaggaatccagtccataccataacaggaatctaaaagctccttgaacgtataatggttgcgaaatttttctgcagtaccatgaaataccagcttatcctcttcccacagcctctttagttcctccagatattttccgcggaacattttggagatgacccggatgggaagaaagaaattttcaccattgtccttccactggttgttggaagccagtcctccccccagcaggatggtatgaatgtggggatgaaagttcatttcagaaccccatgtatgtaaaatgcagatgtatcccacctttgcgccgagatgttttgggtcggcagtcagttcgctgattgtggaagaagctgcatggtataaggcatcataaagaagtctctggttgctgtaaatgacagggtttaaaatatcaggaaccgtaaaaaccagatggaaataaggagcatcaaggacatcctctctgcgtgcatccatccacatttctttcggaacagcctgacacattgggcagcaacggttacggcaggaattgtaatgaatctgtacgaagccacaatcctcacatacacatacatttgcaccataggcaccggtcttgcagttcatgatgttatgtgcaacctttgcctgtacaggggaaggtgaatattgatcaaggtatgccggataaaaacgatgaaaaatatcctgtactgtgggcttatccattggctgtaccatcctttctgtcaaaaggactgcggatgcccataatggatttgttgctgacatgaagataaacttctgtggatttcggatcgcggtgtccaagcaatgcctgaatattccgctgttccactccctgctccataaggtgggtggcaaaactgtgacggaggcagtgaggagtaacaccggataacccagcagccgatgcagaacgtcggataacctgttccagtgtacttacggtaagatactgccctgtaaactgattcggaaacagaatgccctttggtctgcctttccggaaccagtattccgtaagaagtgcaaggtttctttcagacagaatggtataacggtccatccggttcttggtatcccggacatgaatctgcatgtttgtgcgggaaatatcatcataatgaagatgaatcacttccgagacacgcattccggaagaatacattgtggcgaacatggctttatatttcaggtcatccgtagcatcaagaagccggtcaatttcatcagtagaaagtacggttgggagtttgtgctctattatcatgcgtggaacagtgatatcatcccacagaacgtgaagtacattccgatagaaaaaacggatggctgaattataaaggttgagggtggtcgctttcagaccatcgtccttcttggcaagaagaaagtccctgacatcctgacaggtaagctcttccgggtgcttttccatgtaattaaggaaataagaaacatagtttttgtagcagttaatggaacgctctttaaggttacggatttttccagcttcctcaagctgtagtaaatatttttcgtacataataattcctccatgtaaagtcagtaatttcgggtatcactgcttacatggaggtgcattggaataataaaaccgcttgctaaaagaacggttaggtgttaatcttttcatatgcattttttcctttatttatcacagtttctaggtactatgacatgtatacgcagggcggtgttacatatacgccctttacgaacgcctaaaggcgttccctttcttcctgtgtctgccccgttcttaacgctcacgagccttgtaaggctcgtggctaaacggaacagccccagtcagaaaccttattttcggtctgatcattcatcaagacggacaacgtgtatcataagtattacgatgatgtactgatactgttaaagacaggacttcgtatttcggaactgtgcggactgacagtagccgatattgatttcaagaatgaggttgtgattatcgaccaccagttactaaagagcaaggaacagggctattacattgaaacgcctaagacaaagagcggaactaggcaagtgccattaagcaaagaaacgatacaggcatttcaacgggttatgaagaaacggaaatacgaagtcctgtctttaacagtatcagtacatcatcgtaatacttatgatacacgttgtccgtcttgatgaatgacagtaaggcttgttcctgttcttctgtcaatgcgactttctctttggtatcattttctaggacttcactcaacttgaaatcaaagggatttttccttacacaatcgtcttgtatagcgatatagaatgacgcttttaatgagcgtttataattgttaatggtattgtaggaaaagcctttgtctttcatgcgtaacgcccattccttagcgtcagagagcttgattgtgtcaatgctcctagcacctaacttgtcctcttttaataaccgcatgagttgttcccgttgtttctgtgtgcttttcttcacgtttgccctctgtgcgttctgtttggcgtaaagttggcaaagcgtcattttcttgcctgtgctgtcgataccgtcctcaatatcccgtcttatctgctgttccagttcacgagcgtcattttcttgcctgtgctgtcgataccgtcctcaatatcccgtcttatctgctgttccagttcacgaagtgagggtttatcccgttttccctttggtgttgggtctgtgggtgtcaatctccaggcatacacatattttgtgtttccaaatgcgtccacatatttatataagtatttcccatctaatgcaaatgagccttgtatgtgttatgatgaacacaagtcatatcaaggctctttccaacaaggaaaggagcagacaccatgaaagaaaaaagacgggatagcaaaggacgtatcctgcatactggagagagccaacgaacagacgggaaatacttatataaatatgtggacgcatttggaaacacaaaatatgtgtatgcttggagattgacacccacagacccagccgaccgacgagccgaatcttgagcttaaatgtaaggtgtacaatataaacgacggaaagaacaaggctattatggagtcctgtggctggctgaatgattacatgacatttgtaaataaggtcagagagtatcatgcagacggggcatttgatgatcttgctatagatattgagaaggctatagactattgtatcgacaatgatattctgaaggagtttctaaagacttacagaagtgaggtgacgaagagtatgcagttaaattacgaatttgacaggcagcttgagcttgaaagagctgatgctatcgaggaaggcttagaacaaggaataaagcaaggcttagaacagggcttagaacagggcttagaacaaggcttagcacaaggaatagaattgattaaccagctaaatcagattttattgtccgagggcaaatatgatgaattgcagaaagcttcaaaggataaggagtatcaaaaaaagcttcttgcagagtatggacttctcaatgagaagcaaggtgaataaatgagacaaaaagaactcgaaaaatggttaaagatagtaataatagcggtagcactttgcggattagtggtctgtgcggttgccataccatggatagggcatgtgcttattgcgtctgatcctcagatttctgatatgtatataccatggcttgttctgtttatcatcagtgcaattccgtgctatgttatattgtatctgggctggagggtagctgtaaatatcggaaaagacaggtcgttttcattagagaatgcaagacatataaagctggcatcgaaaataattctgtttgatgcattgtatttttttgttgtgaatgtctgcatgtggaggatatatgtgaatcatccgggggtgatactggctcttgtgttcatagtgtttgcctgtgttgtggcatcggtcgtggcggcggttttgtcacatcttgtggtaaaggccgcagatctgcaggagcagagtgatttgacaatatagcgtgtgcgctacagttttatttgagcgggagagatacatggaaggcgagattatttttaacatagacgtaatgcttgcaaagagaaagatgagtgttacggagctgtcgcagcgtgtgggaatcaccatggcaaatatatcaattttaaaaaacggcaaggcaaaggcaatcaaggtatccacgcttgcaaagctatgtgaagcacttgactgtcagccgggagatttgctggaatatagaaattgctcttgcgataatggagaaaatatagtatcataagtgattggcgtgcgccaccttgggcgtacaaacagcaacgtattatgggaggcaattgatagatgaataattatgatgtgataatcattggagcaggaccgggaggtatcttcggagcatatgagcttatcgagaagaatcctgactgcaaaatagcggtttttgaggcaggacatgagcttgctaagagaaaatgtcctatcgacggaaagaaaataaagaactgtatttcctgcaagagctgttctattatgagcggttttggcggagcaggtgctttttcagacggaaaatataatattacaaatgattttggcggtaccttgtacgagcatatcggcaagcagccggccattgatctgatggaatatgttgacgagattaatatgaagtacggcggtgagggcacaaagctttattctacagccggcacaaagctcaaaaaggtctgcatgcagaataagctcaagcttttggatgcatcggtcagacatctcggaactgacataaactatgttgttctggaaaatatgtatgcacatctgaaggataaggtggatttttattttgatacacctgttgagtcggtagaggtgctgtatgatgagaatacagcaggggctgatgcttgcagtttacaagaggctcacacagacaatgtatccggatatgcagtaaaaacagcggatagcacatatgagagcagatactgtatcatctcagttggaagaagcggaagcaagtggatggagaaggtctgcaatgaccttgatatcccaaccaagtcaaaccgtgtggatatcggtgtgcgtgttgagcttccggccctgattttctcacatctgacagatgagctgtatgagagcaagattgtatacagaacacagctttttgaggataatgtgcgtacattctgcatgaatccgcatggcatcgtggtaaatgaaaatacaaacggcatcgtaacagtaaacgggcacagctacgagggagcagacaagcagactgaaaacacgaactttgctcttcttgttgcgaagcatttttcagagccattcaaggatagcaacggatatggtgagagcatcgcgcgcctttcaaatatgcttggtggtggtgtaattgtacagcgctttggtgatcttgtgagagggcgtcgaagcaatgagaagcgtattgaggaaggactcgttactcctacactttcagctacaccgggagacttaagcctagtgcttccaaagagaatcctggacggaatcattgagatgatttacgcgctcgacaagatagcaccgggaactgcaaatgacgataccttgctttacggcgtagaggtcaagttctacaacatggaggtagagcttaacgataggcttgagagcaaatataagggactttacatcatcggagacggaagcggtgtgacacattcactttcacatgcgtcggcaagcggcgtgtatgttgcgcgtgagattgaggcagagagatagttgctgttaaagatggttactgttcacacctaacagtgtgaccagcaacgattacagcccatttaaaatatataagcaatgattgaggatgtatagatttaaaatgatatgtgagaacataatatttctataattgggaaatattatcattatgaactattgaaatgctacattagttagattaaactaaccgtgtagcatttttctttatttataaatatatgcatatgcggcaggctttcacatatgtatttttatgattaaagggtcaaaagatatcatcgatgcatgcttggatgcaattcgatgtataccttaggataaaatagaatcagaaaaaacataaggaggttcataatgaattatttagaaatcgaaaaggtagtgggcagagaaatacttgattccagaggaaatcctacagttgaggcagaggtttatctggttgacggaactgttgcaagaggcacagcaccatcaggagcttcaacaggagagttcgaggcacttgagcttcgtgacggagacaagagcagatatctgggcaagggtgttaccggggcagtagaaaatataaatactgtaatcaacgacacattgacaggtatggacgcaagtgatatctatgcaatagatgtggctatgatagaggcagatggcacaaaggacaagtctaagcttggagctaatgccattcttgctgtatcaattgcgtgtgcgagggcggcagctgtatcacttgatattcctctctatagatttttaggtggtatctcgggaaacagacttcctgtacctatgatgaacattgtaaacggtggctgtcatgcactctcatcaggacttgacgtgcaggagtttatgattatgccggtaggtgcgccttccttcaaggagtgtctcagatggtgtgcggaggtatttcatgcacttgcagccatattaaaggagcgcggtcttgccacgtcagtcggtgacgagggtggatttgcacctgcactcaaatctgacgaggaggctatcgagacaatacttgaagctgtaaagaaggcaggctatgagccgggcaaggatttcaagattgccatggatgccgcatcatcagagtggaagagtgaaaagggcaagggcttttacaagctgccaaaagccggcacagagtacacctcagaggcgcttatagagcactgggcaaagctctgtgacaaatatcctattatatcaatcgaggatggtcttgatgaggaggactgggaaggctggcagaagcttactgcgcgtctgggcgatagggtacagcttgtaggagatgacctgttcgtaacaaacactgagagacttgcaaagggaataagccttggagcaggaaatgcaatcctgattaaattaaaccagatcggttcagtatcagagactcttgaggctatcaagatggcgcacaaggcaggctatacagcaatcagctcacaccgctcaggtgagactgccgacacaacaattgcagaccttgcggtggcactcaacacatgccagataaagacaggtgcaccttcgcgctcagagcgtgttgcaaagtataaccagcttttaagaattgaagaggaactgggaaagagcgcagtttatccgggaattaaagcgtttaatgtgcagcagtagtttaaaataaaactctatgactgcattaagtcaatatccattggagtgtctttaggagaaaataagataagtatagtcgcagatatcataatatggtatctgcgattttttgtttttttcagtaattctaaatgtcgtcgaaaaatctcattttagcacatcaattgtagtccttaattgtagctcttaattttagcacatcaattgtagcaattaaaatagatttatcgtaacacgataaaaaaatattgcaaaaccaaaaacagtgtagtacaattagcttgccggtaagtgaataatatgagaaaataactacatagatagtaaggaggtagctatggacaataataatatcgggggcatgaatccacaacagttttcacagaacacgccacagacttcacagccacatatgggaatgtcaggtatcgaactgcagaatatgcagcaggaagcggagcaaagacggcgtgagaaaagcaggagaaacgcggatttctttggcaggctatgtatacctacgataatatatgcgctgctgtacaccattttcctgtacgagaatacaggtggaatactggttacgttgtttgcaatcgtcacaggagtatacagcctgtattgtatgcagatacttcatatagaggcaaagccactcactatatggtacagtgtgatgatgatactcacaggcctatcatcaggcttgaccggtaataaaattatacaaggatttaatttttgctggatacttgtgtttcttgtttttatgctgcttcacaatttctgcaatgacagacagtgggggcttataaagtatatcgttgcggcatttcaggcagtgtttggagcgattgggtgtatagctgagccgtttatggatattgccgactatatgagaaatgagcgcatggatagtgacaatatgggcagtgacagtatggtcggtgacagtgcaaatgcaactgccggagagcggcatgtgaaaaaacacagaatgctttatgtgtttatcggaatagcaattgcctttcctctggttgtgctgatagtggtgctgctgtgctctgcggatgcggtttttgcctcagtaataaagaaaatatttgctgatatcaatttctttacagtgagcaaggttgtatttctttttgtatttgcgcttttctcatcgtactgtggtataaagtatctgagcaagaagcgtatatcagatacaccggttgagactccggcatttccggctgcaatcggtatcactgtagctgcaactatatcagtggtatatgtatttttctgttttatacagattgtgtatctgttcgggggacttatgcagcttccaagtggctatacctacgccaggtatgcgagagaaggctttttccagctgctttttgtgtgtatacttaatgtgattatcgtattgctcggaagtggattgttcaggaaaaataaaatattaaatgcatttttaattttaataacactgtgcacatatatcatgattgcatcaagtgcataccgtatgggactgtatgtgtcagagtacgggctgacagccaccaggctttgtgtgttctgggcacttggagtgatagcgctgtttatgctcggagtgattttatctatatgtaagcctgctttttcgctatttcggtacggaataatagtaatcggggtatgttatcttgtgcttgcatttgcaaggcctgattatctggttgcaaggtacaatacagtatgtatggaggatacagactacaaatatcttatgtcactttccacggatgcatccccggcgcttgcggcagatgcagactttatggaaaataaggggatggtcaacatgtatgcaagacagcttgcaggtgagacgaatgacagcttaagacagctcaatgtgtctcatataaaggcagcacatttattcagagatagcatagatgaggtaaagagctcacagcttatccttttatatgtatattcgccttgcgattcgggcagctataacaacaatgataccggtcttgatggcgtggacagcatacagatgggctatcatgtgttaaaggatacagaagatgatgacacagcctactatgattacgacagttatagcatggatgatacaagagtggcagcaccagtattattcaaatgggtggatgcagtcgaggtgaagaagatttccgacagtgagcgtatcttccttgcaaagattccaagaaaggcattaaaaggcaaagagggagtgaatattgaatacagatttaataaaaatggagatgttatatattcatcccagtacaatgtgatccttgacaagaaaaaaggactcaacgaggtggagatgtcatactatgccggaacagatggcgtggatgtgcctgagtacaatatttatggaaagtaatagtttaaattgtatataatccaaaaacggacatggcagttttgcatgtccgtttttgtttttgtataataagtatatggtattatgaaccgggtggtttacataaagcagagtaaaatttaatcaagctttaatattaatcctaatatacgctttacagaggtctccatctcactacgagagatggcacccttatcataagccttctttacacgatcaggatatccatttcccatcttaagatcatttccggcttttgtctccttgtaatgctcgccacaggtccaccagtcggttgtgaccattccttcatagccccactcatcacgcagtattcctgtcaaaaggtcctcgctttcagaggctctgtagccgtttatcatattgtaagaggacataatagcccatggattatcattctttacaatcatctcaaatgccttcagataaatttctctggcagctctttctgaaacgcgtgaatcgctgtttttgcggttggtttccttgttgttcaaggcaaagtgcttgagtgtggcaccgacattgtttgactggattccgcgtaccatggcacctgcgagctttcctgttacgaatggatcctctgagtagtactcgaagttacgtccgcagagaggacttctgtgaatacagatggcaggggtgagccacagtgcaaggttgttttcctttaattcttcaccgccggcgcgtcctacagcctctaaaacatccgggttccatgtgcatgcaagcagtgtggagcatggaaacgcagtggtgcatataccgacctcaggcgctatgcgcactcctgcaggaccatctgctgtcatgacagaaggaataccgtattcaggcatatttccgataccgaaggtatttgcaacaccggtatttggctgtccgccgagcagatgaatgagatcatcgatggaaagctctgatacaaattcatcaagcgtgatacgtccttccacaacatccatgatgtcgtgactgccgtttttagccatgccatcggcaaagcggaagtatgggatggctctctgaccgggagcaacaccctctgtcagggaagggtcaatgttgccaatagctgagtagtcggtgtcaacaggctcactttgaggcagagcttcatagcttccgtcagcgagcattctctttggcagacttgtaggaaccagctttgctgaaagctgctcggtaattacatcatgatttaatatatatgagtaatcagcttttgtcacgtcacggacgctcgttccaacgtatatatcatatgaaccggcttcaagtacatatgcggattttttaacctttccaaggtcatcatatgatgccatatcgtttatttcccatgtaaggatcataagctgtgattcacccggctgcagttctcttgtcttttcaaaggctgcgagctcctttgcaggcttgccaagctttccttgtggtttagcaatgtatacctgaacaacctcttttccggagaatttacctgtatttgtcacacgaacttttgcgtagagcttattggtctcagacgtacagttggaattcacaacgccggcagaaacagtctccacatcaaatgaggtgtatgagaggccatagccaaatgggtatacaaccttctcggcagctcccggaattgtctcgaaatagcggtatccgacatatatatcttcggtatagtccacatagtttcttgactcgtggaaattgtaagtagacggatagtcgtcgagtgatttggcaaatgtatcgacagtttttccggaaggattgccatctcctacgagaagctcagcggcagcaagcccgccttcaataccaccctgtaaggcaagcagtgctgattgaatctgatcatcataagcaaaccaagatgtatcaaccattccgccgacatttaaaatcacgattacatttttgaaactggcttttacagtgtcaatcatctccttttcttttacggagagacagaaatcaccatccttaaaaagctctgccgacttttcggtcatctcgcgttcgtagtcccagagagccttgttgtttgggtcaataacactctttctgtcccagccttctccggagtagcggcagattgagatgatagcagtgtcggtatatgcctgagccttgcttaaaagctcagccggtacatccggctctatagtcatgccgggtacagcaccggctgcatactgctttttaatgtcgttgcggtagtaatcgcacagctcctcaaatatgcttattttctctttttgaagcttaagtccttcgtagagattgcggatatatgcaacggttacatcaccgcttccgccaccgccctttacatagtcgaaagtaccctttccaaacagggctaccttagaacccgctgcaagagggagtacgttgttttcgtttttgagaagtaccatgccttccttggcagcttcctttgaaagctctatgtgagccttgcttcctgtaactctttcaccatttgccccaagtggaagattaggagtgaatttgaatcgtgaccatttgttcatagcagattacctttcttatatttttattatttaaagagcttcccatacattaatatgtagggagcttgttcttttcgtacaagatgattgtaaattataaaagcgatatatacaattgtgatactgacattattttaggtcgatattgactttttgcgtgagaggagtatattttgaaggtagaatttcaaactatgaatattgtttccttcggaataatttggatatcctcaggctaatatagcatgattaaagggtcaaaaggtatcatagcattaaatacgaagtttgatttagtaagtcagggagaaaattatgcagcaatacacacacgaaaacgtcagatcaataccacatcttccaatctactgcgacagatatgaggactacaggcagttttcaccgaggcactggcatgaccatatagagataatctatgtagtttccggctcactgcaggttgtctgcggtgaaaatgaatatacattgcaagaaaatgaattttttgtcataaactcaaataagatacatggcacgcaaagctatgaaagagtcagggtgcttctggtacagataccgtatgcatatctggacagctacatagacgattacggacatataaggtttagagagtgctatgagaccgagcatggcagcagaaaatatgagcagatgaagtctcttcttaagtcgatagcgcatatataccgaaaaaagggcaagggctatgagcttcggcttatggcaaaagtgaacgaatttctatatattttgtttacaaattattcgtacaaagagatgaatgcgggaaaagaatccagacagatagcgcgccttaaggatgtccttagatatgtggcgaaaaactatcaggagccaatagcattaaaggaggctgcagacatagcctcactcaatcaggattatttctgccgtatgttcaaaaaatgcatgggagttacatttctcgagtatgtcaatcaggtaagaatcaatcacatacatgaggagcttctggcaactgaggattccatcacggacatactggagcacaatggatttacgaattataaggtgttcagccggatgtttaaggcgcagtttggcatgacaccgagggaattgcgaaaattacaggaaaattaaaatgtcatgaatttgatgtttttgtgcttttttttgtatattttaaggatacttaatcgttatagtaatgctgtggttacgggttacactgaaaggtgtggacagtaacatgatgcgagatagcaaataactataaatgaaaggggtactttatgaataaaagagtattatcagccatgccgtcacagacgtttgcagagggagcgttggatgcggcgcagcagacaggcaaactaagctatgatggctacaaaaaagtgtggagcgatgagtttaatggtgattcattaaaccgtgctgactggaatgtggagatacatgaaaaaggatgggtaaataatgagctgcaggagtatgtagactcggctgaaaacattcaggtaaaagatggaaaattaataataaatccggtcaaaaaagttactgatggtgataccggctcaacaaaagaagcagcttcctatacatcaggaagagtttcaacacagaataaacagaccttcatatatggacgatttgaatgccgtgcaaaggttccaaagggacaggggtaccttcctgcattctggcttatggcaaatgatgagaatgtatatggtcagtggccaagatgtggcgaaattgactgcatggaagtaatgggtcaggagacaaacaaggcttacggaaccctccattacggaaatcctcattcacagtcacagggtacatatactataacggatggagccgatttctctgatgatttccacatatatacctgtgactgggagccggggaaaatcacatggtatgtggatggagttaaataccacgaggagagcgaatggcactcaacaacagtaggacagggaacacttgcatatccggcaccatttgaccagccattttacattatcttaaatcttgctgttggtggaagctgggttggaaatccaaacgatgagacaagctttgagaataatccatatgtgatcgattatgtccgtgtatatcagaaggatagctacgatgaagatgttaaacgccccggtgagataagtttagttatgtcatgaatctgatattttgagaaataattttgtataatacactgctgcaaaaatgtatattatattacgaaaatggattactgctgaatatacgttggaggcagttataaccgtagatcacataattaagtagagaatggagtaatgaatatgaaatacggatattttgatgaatcaaaaaaagaatatgttattacaagacctgatacaccggcaccatgggtaaactatcttggatcgcctgagtatggagcaattgtttccaataatgcaggtggatacagctttgcaaagtcaggtgcaaacggaaggcttttgagatatgtgtttaatcagttcgatgagcctggcagatatatttatatcagagacaacgagagcaaggattactggtcagcttcgtggcagcctgtaggaaaggatttgaatgaatacaagagtgagtgtcatcatggaacagcatacacaaagatgatggctgattacagcggtattcattcagaagtaagatattacgttccgctgaacaagacatacgaagtgtggaatttgagcgtgacaaataattctgataaggcaagaagccttaatattacaggctacgctgagtttacaaacaacagcaactatgagcaggatcaggtgaatctgcagtattcacagtatattacaaagacagtatttgtggagaacagagtgcgtcagatgatccatgccaatcttgaccgcatcgagaatggcaaggaaattgacaacaaggatgtggtaaacagatttatcggacttgcaggagcacctgttgacagctggtgcggtgacaggggagaatttctcggagaatatcacagatatggcaatcctgtcggagtagagagcggaaagcttaacaaccacggcaactacaacgagaatagctgtggagcaatcacaacagtattggagctggcgccgggcgagacaaagacaatagcattcttagttggaatgatagataatgagacagcaggaaagattgttgcttcttacacggatacaaaagctgtctgcgacaaagaacttgaggagcttatcgcatactggcatggaaagttatcacatttccagattaatacaccaagtgatgagttcaacacaatgatcaatacatggaacgcatacaactgtttcatgacatttatctggtcaagggctgcatcatttacatactgtggactcagaaacggatacggataccgtgatacagtccaggatattcagggtgttatacaccttgcacctgagatggctgttgaaaagatcagattcatgctctcagcacaggttgataacggtggaggacttccgcttgtcaagtttacacacaatccgggacatgaggatactcctgacgacgcttcctatgtacaggagacaggacatccggcttacagagctgatgatgcattatggcttttcccaactgtatacaaatatgtatcagagacaggaaatgtagcatttatagatgaggtcattccattcgccaacaaggatgagggaacggtttacgagcatttaaagagagcaattgatttttcgatgaaccacctcggaaaacatggaatgcctgcaggactttacgcagactggaatgactgcctgagacttggtgcagatggagagtcaactttcgtagcacttcagttctactatgcaatgactatattaaaagagtttgcagcctataagaaagatgatgaatatatcgcatatcttgatgagagccaggaaaaactcggaaagatcattcaggagctttgctggaatgaggacagatttattcgtggatttacaggggatggacaggttatcggaaagcgtgatgatcttgaggcaaatatgtggctcaacccacagagctgggctgttataagtggatttgcaagtgatgagcaggctgataaggctcttgaaatggtatatgaaagactcaataccgagtatggcgccattcttatggatcctccatatcatgcacacgcattcgacggagcactcgcagtgatatacaatgcgggaaccaaagagaatgcaggaatattctcacagtcacagggctggataattcttgctgaggcacttaaaggacatggagacagagcttttaagtattttattgaaaatgctcctgccgcacagaatgacagagcagagataagaagacttgagccgtactgctatggacagtttactgaaggaaaagcaagtccgaactttggacgttcacatgtacactggctcacaggaactgcttcaacagtcatggttggatgtgtagagggaatacttggtatgcgtcctgatttctatggacttcatattgctccgtctattccaaaagcttgggatggattcgagatagagaaggatttcaggggatgccatcttcatatagttgtaaaaaatcctgatcatgttgagagcggatgcaagagccttcttgtaaacggacaggcggttgagggagactatatcccaaaagagcttcttagcgagcagacagagattgagcttaccatgtaaattttccgtaggtgggataatgactgctataggattgtatatggtgtgtgaaaatttgatttgtaattgtatagaggattgattgaaaatatgaaagatatagattttatagacaaatatggaaccttcaggatcgaaaatcccgaaaactacagtggactgtatctgccgcttgcaggggaaaaagggcttaaatcaagcattacaccaactctcggcggagacagtaaaacaagccagaataccttccttctggaacctgttagtatagaaaatctccacaacaataaaggcaccagaaatttctggtgtcggattgtggggaagggcttctggtcagtatgcggatcatctgcacagcaggaggccgacagatttacaggtaatcaggatgaaagtgagcttgaggcaggtttaatgtggcagaagctgcaccgtgcttcaaagatatatgggttagaggccgacacgacatcatttgtcacacttgatggaagtatggaagtcatgcttgtggagatcactaacaagacagatgaggctatggagatagtcccaatcggggcaattccaatctatggcagaagtgctgacaatatcagggatcacagacatgtgacatcacttttgcacagaatagaaaccacacaatacggcattgaggttacacctgtcctctcgtttgatgagcgtggacaccggaaaaatgatataagctacttcgtatatggatcatccggaaacggagaaagtcctgagagtttctatcctaccgttgagcagtttataggagagggaggctctttccttattcctgaggcagtcagaactgaaaaagcaggtgcaaaggccggagaaaaatttcagggaaaagaagcagtcggagcaataaaatttgtaaaccgtattataaaaccgctggagacggtaagctatatcatgcttgcaggtcttacggaaaaagaaaatgacataaatgccattaccggacggtaccgcagtgtacttgaagtaaaagaagaactaaacaccgtcaagaaacactggatagacaaggtaaatattgattttgagacaggaaatgccaaggaggacaattatcttaaatggatatgttttcaacctatcttgcgaagaatatacggctgttcattccttccacatcatgattatggaaaaggtggaagaggctggagagatctatggcaggactgtcttgcacttttacttatggaaccttcggatgtccgcagtatgattgtaaacaattatggcggtgtgagaattgatggaaccaatgcgactattataggaaacgagcctggcgagtttatcgctgacagaaataacatcacacgtgtatggatggatcacgcattctggccttttgtaaccacaaagctttatattgaccagaccggtgatacagatgtactttttgagcgtacgacgtactttaaggattaccagtccatgagaggcacaagccatgatgaagaatggaatactacatatggtaacaaacaaaggacggcaggcggtcagatatattttggaacggttttagagcatattctgatccaaaatctgtgcgctttctatgatgttggggagcacaacgagatgaggctgcacggtgcagactggaacgatgcgctcgatatggcatgggacaaaggcgaaagtgttgcatttacatgtgcatatgccggaaatctgcttgatatagcaaagtgtttaagaaatgtggaaaaaataagtggaataaacaggattgaggtgttagatgagcttaagctgctgcttgctgatgacgaaatactttacaactgccctgacaaaaagcaggatcttctcatgagctatgcaaaggcatgtgagaactgcacaagcggaggcactgttcttgtcccaatagctgcgatttgcgaaaacctggagcataaggctgagtggatgatgaaaaacatccgcgaaaacgaatggatatcagatggcacggatggaggctggttcaacggatattatgacaataacggcagaccggtggaacgatgtgagagtggagatgtacgcatgatgcttacgggacaggtatttgccatcatgagtggaactgcaaaaaaagaacagatcaaggcaatctgtaatagcgcagacaaatatctgtttgatcaaaaagccggtggctacagactaaacactgattttaaggaagaaaagtttgatcttggaagaatgtttggatttgcatatggtgaaaaagaaaatggtgctgtattctcacatatggctgtaatgtatgccaatgcgctctataaacagggctttataaaagagggctacaaggtattaaagacgcttcttgatactgcgatggactttgacagaagcaggatgtatccgggagtaccggagtattttgataatgatggaagaggtctgtattcataccttacaggtgccgcaagctggtatatgcttactatgataacatctgtatacggagtccatggagagcttggagatcttgttattgagcctgcactcatgccacagcagtataacgaaaaaggtgatgcaaaagtttcgttagaatttgcaggtcatggatttgatattttagttcacaatcctgataagctcgaacctggggatgcgcaggtcaaaagagcactctgcgatgatgtaaaagtggaaaatgttacaggaaacagcgtgcgtattccaaggcatgctattgaaatgctttctacagacaaatgtcatacggttgagatatacatagagtgatagtttataaaattaatagcgtttgatatcgtatattgggtatcagttaaataaaaattcccacgcatgtttgtgtgggaattttttgtgcgcagtacaaggcatgtggtatcaggctaccacatggatttgtagtatctgtcacgatatttctttggtgtaagccccgtaaaactctcgaagatctggataaagtggctctgtgatgaaaatgacaggtagttggctatatctataatcggcttatctgagtatttgagcaggtgagtcgctttttctattttcttttcccttatataatcacttatcgaaacaccgagattctgcttgaatacccttgaaagatagctctcggaaagacctgtgtatgcagccagatcagctattgtgatacgctcttttatgttgctgtatatatagtcaacacactgggtaacaggctttgagaggatagatgatttcttctgcagcaccatcttacctgtgaaatcctttgccatctcgtgatgcaggtcagcaacctggcgtacggtggagcagctgtccatcttaagtatatagaagtcactcagacggtatgcctgctcaggctcgagtcctccatcaatacagtatcttgtgatcatggcggttgtgacaacaaagtgatatttgatattctgtaaactatttctggacaatacacctgttccttcaaggtgtataaatgcatcttctttgcagttttttattacatattccatatccccggttttgactgcgttataaaaactatattcaatacttggagcacgatgcagtgattcgctctcgctgtcaacaaattctgcgtcataccattcttttgaaagtgccataaaggttctcctttgcaacaaaatattagatttatgtcatctttctattattatgacatgaatctgatatttttacaattgatttaatataaacaaaaacggttaaggagtaatattacaactgtaaacgagatatcaaaatagtttctatggaggaaatgaaaaatgaaacagaaagtgattagcacaatgctgttactgtctatgggggcaacactccttgcaggatgtggaacaacagcaggaaacggaaaagaaggcgtagcaggcgattctaatgcagaagagggaaaggttatcaatatctattcatggaacgatgagtttagaacaagagttgaggctgtttacccggaggttaaagaaacttctaaagatggtacaattacatacctcaaggatggcacagaaattcattggatagtaaatcctaaccaggatggtgtttaccagcagaagcttgatgaagctatttcaaaacaggcggatgcagcagcagatgacaagattgatatgttcttatcggagacagattacgtattcaaatatacagataaagatgcagacgtagcaatgcctcttaaggatcttggaattgattgtgacaaagagtttgctgatcagttcgatttcacaagaaaaacagcttctgattcagacggagtacagagaggttcaacatggcagtgctgtcctggacttttagtttaccgtcgcgatattgcaaaggatgtattcggaacagatgatcctgaagcaatcggtgagaagacaaaggactgggatacattaaaggctacagcagcggaacttaaggcaaagggatactacacattatcttcttacgctgatacattccgtttatatggaaactcaatcgatgactcatgggtacagcctggagcagatgaggttgtagtggataagaatattacaaactgggtagatgattcaaaagagtggcttgatgcaggatatgttgatgctaacgttaaaggccagtttaatgatgactggaacaaagcaatgggttctcagtcaaaggtatttgcattccttttcccagcatggggaatcgatttcacacttgcaccaaactgggatggagcagcaggatcatgggctgttacaacaccaccacagaattacaactggggcggatcttacatccacgcagcaacaggaacagataaccctaagcatgttaaggatatcatccttgctttaacagcaaataaagacaacttactcaagatctctaaggattactctgatttcacaaatacaaaatcaggaatgcaggaagcagcaaaagatgattcattcgcatcagacttccttggcggacagaacccatttgcttactttgaaccggtagctgagaatatcaagattgcacctctttcagcatatgatcagggatgtgtagagctcatccagaacgcattcagcgattacttacagggcaaggttgattatgataaggctaagaaaaactttgagacagcaattgaagaacgttatcctgatatcaaaaaggttacatggccgaaataagataaataaaacactctgcggagcctttgggcttcgcagaggtgactttggtagaaaggaatttggctcatgaagaagaaaagaaagagcgtaagctatgcaaaatggggatatatctttattcttccgtttttcataacatatttaattttttctctgattccgttagtagatacggtaaggtttagtttttttgaatactatagatccggaatcaaagaaataggaccgaattttgtgggatgggctaactatgccgagcttcttaaatcggatatgatcacatatggtaagaatactcttatcctctgggttatcggatttattccacagattgtggttgcacttgttttagcaaactggttcactgatgccagattaaaaattcacaaattacagttttttaaggtagtaatttatctgccaaacctgatcatggcatctgcatttgcacttttgttctttacgctgttctcgaccagtggtcctgtgaactcagtcctgcagtctatgggagtaatcagcaagcctatcgactttatgggaagtgtatttggaaccagatcactcatcggcttcatgaacttccttatgtggttcggtaatacgactattatgctcatggcagcagttatgggtatcagtacagaagtatttgaggcggcagatctggatggatgtaatgcattgcagagattcttctatataactttaccgagtatacgaccaatacttgcatatacactcatcacatcaatcatcggtggactccagatgttcgatgtacctcagattctgacaaacggacagggaaatccggacagaacgtcaatgacacttatcatgttcctgaacaaccacttaaagagtaagaactatggtatggccggaacattgtcagtatatctgtttatagtcagcgcaattctgtgcttcatcgtatacagaatgacaaatgacagcgatcctgacggatcaaaggcagcagcaaagcgagctgcaaaagaagctagaagaaagaaaaaggaggcggctaaataatgaaaccaaaacataaaattaatgtccgcagtattatagcgcatatagttttgatattattatcatttttatgcctgttcttctttgtaatacttataatcaatgcgacaaggtcgcatgcacagttgcagaagggcttctcatttatcccgggcgggcatttcctggataatctgaaatctgtagctaatgacggaactttccctatgtttaggggaatagtaaacagccttattatatcgggctcatgtgcagttttatgtacatatttttcatcgcttacagcatatggactttatgcttacgatttcaaattaaagaaagttgcatttacatttatcatggcgatactggttatgccgacacaggttactgcgatgggcttcctgcgtttaataacaaagatgggaatgtatgattcgtgggctccacttatcattccatcaatagcatcgccggcggtattctatttcatgtacagctatctacagtcatcacttcctctatcacttgtagaagctgcacgaattgatggttcgaatgagtttaggacattcaaccatatagtattgccgatcatgaaacctgcaattgcagtacaggcaattttcacatttgtaggttcatggaacaactacttcacaccggccctgatcatccagtcaaagaataagatgacagtaccaattttgattgccacacttcgaggagcggactatatgaatttcgatatgggaaaaatctatatgatgataacagtagctatcgtgcctattattgttgtatatctcctcttatcaaaatatattattgccggtgtcacacttggaggcgtgaaggagtaaacaatttaattagttttagcatcagagcagatggcttacatatatgttatgtaggtcatctgtttttagtatattgaaatatgaggtacagcatattttttatttaggaaatattgtggcacctatgcagtatatcagcagaaaaatgcagaaaataactaaatgattgttgattaaataattctaaaatgatagattatggaattgactcatggtataatataacgaacgtaaagatatgtgcgtcgaaagagatatcatatagataagattggagaaaatacatgaacccagcaagcataatgaaaatgatgaaagcaaaaaatacatttacagcaaaccacccaaagtttgtatcctttttacagtatgcattcggcagcggcatcccggcagactctgttattgaaatcacagttacaaagccgggacaggagcctgtgacctccaatatcaaggtgcagcagtcggatctcgagcttttggagagtcttaaggacttaaaatagaggtaaaatatgttataccagattaaggatgggacagtttcggcaggaggacagacgattctgtcccatattgatttttatataaaggaaaaagaaaaaatagctgtagttggcaaaaacggcgctggaaagaccacactgcttcggcttcttgctggtgagctgacacctgacagggatgacagcaggggcagttacggcagaagcaatgatatggtcacgggagctgccactgcaggcagtgatttagatggtacggcaaaaagaactcaaagagcaaaaaagaagaaaccgtcgggaaacccggaaaccggaatcactatgtccagaaatatcacaattgatatgcttagacaggcggataaatcaaatcaggatttgacaatagagcagatactgcttgagagctgcccggataaagataccttttcaaaagagaggtttgactacgagatggagtacgaccggctttttacaggctttggctttgaaaagagtgacaagacgaggctttttaggagcttttcaggaggagaacagacgaagatttctctgataaagctgcttttaaagaagcctgatcttttgctcttggatgagccgactaaccatctggatatgaaaactgtcgagtggctggaggattatctgataaactatccaaaggctgttgtcatggtgtcgcatgacagggcatttcttgatgcggttgcgactggtgtatatgagcttgaaaacagagcattgcacagatatgccggcaattacacgcagtacaggcagcagaagcttaaaaatctgcagatacagcgcaaagcctacgagcgtcagcaggcggagattgcgcacaataatgagcttatcgagaaattcaagcataagccgaagaaagctgcgtttgcacgctcgcgcaagaccatgctggcacgcatgaagctgatagaaaagccggttgaagacgaagctcatatttttacaggcaatatcgagccacagtttccgggcggtaaatgggtttacgaggcgaaggaattaaaaattggatatgacggcagggcactgcttgagctgtcgcttcgtataaggcgtggtcagaagattgccgtaattggtgacaacggcataggaaaatcaacatttctaaagactgtggcaggacttattccgccaataaagggcacaagccagcttggcagcaatctgctggtgggatattttgaccagcagtcggcacttatagacagcgataagaccgtgagagaccattttcatgagctttttccggcacttgtggagaaggacttaagaaagacgcttggcatgtatctgtttggaggggcaaatgcctcaaagcgtatcagctcgctctcaggcggtgagaagtccaggcttgtgctcgcagagcttctgacaggccgtccgaacttaatgatactcgatgagccgaccaatcatatggatattccggcgaaggagacactcgaatcggcatttaaggcatataccggcaccatgctctttgtatcgcatgacaggtatttcataaagcaggtggctgatgccatactggtctttgaaaatgacaaagtgatgtactatccgtttggatatgaccattatatttcaaggcttaaagtatcacaggacggcaatctgccggcgctcatgcaggcaaaggatgctgcgatggtcgaggcacttgcggctgtcccaaagagggagaggcatgagaccagacagctttcgacagatgaggcgtacctcgagtggaagcttacgcttgcggcagagccaatgatgaaagcggctgatgaagcagaaaaggtttatgataagctatgtgaagcagaaagcgctcttaacgaagaaaatgtcgataagctgcgactgcaatatgaaaaagttgctgactcatggacaaaggagtgtacaaaatggtatgatatatacttagatgagatgtatccagagagtgatttttaatttgcagacataatggaatcaatgtcatttgctgtatatcataaattatccggggagaaaggattatatatgtggttatcaagatattttgtgtattttattatatttagctgtatgggctggatatatgagagcatttactgtaccatcagggcaaaaaaatgggagaacagaggatttctctatggtccgctctgtcctatttacggagccggaggtgtcgcgatcactgcgatagcagattttatttctgctcacacggatgctacatttacatggtggcagatatttcttgtggcattttttggaagcattgtcttagaatatggcacatcatgggcgcttgagaagttgtttcatgcatactggtgggattacagcagcatgccgctcaatataaacggcagggtgtgttttccatattctgtaggctttggagtggcaggacttatagtggtatattttattgcaccgtttacgaagcttatcacaggctggatgtcacctatatggtatgagtttttctcactgtttctcatgggccttttagctgtagacactgcaatcaccgtgtctgcgcttacagatttcagtagaacgatcgtcaatctgcagaacaatttcaatacctatatggatgaggttgtggaagaggttaaagagcgtaagaaggcggctgatgaaagggcagaggagcggtcacaggagcttgcggaggctgtcgaggagcgcagaaagagaaaacgtatcagagccagtgcggaccgcgtcatcgattcaatgggtgctttaaagaaatctgcgcttaaccgagcacagggctttagaaatccaaaggtggagaacaggtatctcgatacctttacagagagtctgaaggaacgctttaaaagagaacgtataaggaaagcaaagaaggcgaaaaaggcagataaataacaaataaaaatttttaaaaaaatttcaaaaaaagcttgcattatccgattgatcgtggtactataatacacggttcgttggtcaagcggttaagacgccgccctctcacggcggaaacacgggttcgattcccgtacggactgctaaaacaaaaagccctcagtacacagtactgagggctttttatttttgcaagctattaataactataaaaccactgagaataaaaagctgatgcctgcccggcttgtttagaatctcagtggggatcattgaaatagtagccacatccacactgtgcttgaaggtgtactagatgtggtgaccgccaccactgtgactgccgccactatgacctccaccaccgctgtgaccgccacttgagcctgagctttgtggactgtagtttcttgtctggttcataaagcgtgcgcgtgcattatgaatctctacctttgtaaatgctgcacccatgagctcgttgctcttagccttgcggccctttgacagggataatgcatatacaaagcaaaaaatcatgccggcagcgagagcgataaagatacttgaaatgtatctgagaggctgtgatatatgtccgcctgcaaggactgtgttgacctggtctattgtttccgtacagcaggtgaaatagtcgtaatcatgacttgaggtggcatatatataagtgttgtcacagatggagttacattttgagtttggaatggttctctgcgtgcttccctcacaagccagataaatctcgtctaaatctctgtctattacgaaaatgacaccgtttgcgccatttccaaaatagccttcaaaggtattgactgcatagctttcagtgcttccgtaaggatgtgaggtagtggtgacaacagctatgttgcagtattcggttgtctttttcatctgtgagatgagcctgccatttacggcatcgtcaatgaaattggcagagtcatcaaggatgtactcgtagccggtagacttgtttgttccgcttagattgtaatttgtggctgtctcagtggcatatacatttgatgagctgctcaaaacaaggactgtaacaagcaaaaataatgtaaataaagctgagcacctgcattttatacaatgcaaaaaaggacttttataattatttctatgcacggtcatcacctcccttatgtgtggcaaactgtggcagcttgcgcgttgtaagcacattgaatgcgcggatgacattaatcagtgtgataagcactgaggcgatgatgataaaagctgcgccatagtaccatgcatcgagcaccggctggaacaaaagaacagcatcgccaataagcatggataccatgccaaagatgagtccggcaactcccttgtgtccgggcatccggtcaaagcttgagaaggctctgattgaaaaaatgaatgatataatggtcaaaataacaaacaaaatcaggctgccgtctgcattgccaaagctgcctccgatacctgcgatgattgcaaacagcgcaggtacgaattgaatgacaaatataaaaagtataaagtaagctacaaacgatgtgtttgtctttttctttatggttttcgtggccttttttgcagccttaaggcgtctgcggttgctgattgcaccaagtgcctccggctgttcctttgcgatacggcccttatcctcggtaccggcttcctttacagcaatcatggtcagctcctgtgagtaacagatatttgcgataatcgcaagcacaccgactatggtgagagtcattccgggagtgagaaccgtcagcagacataataaaatgtataccggaattgccgcaatgagtgagcctagcaggaatttaccgacagatataggcagatctgcaacaaccttgccggtctggccgtttactgtggcatatgccacacgatccttattgcggtacgacaaaaaccataccggaaacatcgagtaatctgtctcttttacagtagtgccaagacttgaaggcgaaagagcagcggagtcactgtcgactgacaagccggtaaaggcaggctctttacttatttcgcttattgtgtttgtgcaggctgcatccattgcgtcgcttgcgtaaaccgttgatggtaaatcagctgtatcagcgtaaaaaccacttaagaatgccggtgtaaagcgcttcatattcttcacatcataaggcgcgagtttttcgctgatgctgtcatcaaaggatgatgatgcatcgtaggacaggcctttgtagtaggcgtcgagatctccctcgagcctgaaatggtctgtaatgatgtaatctcctgaacggtgggatctttttgccggaagtgaaataggagccttctgggttacataatatgtccagtaaggcatgtagatacctctgaatccatcgataaacttaggatccttaagctcctttggcgcgaaaatagcctttttcatgaggctcatgtaggcctgcttacagtcatccttactcttggcaaatggtatgatataagccggcttgtgctccttttgcatgcggctgtagagcacagttgatgcaccgcagaagctgcagaagcctgctgcggtatcgtctgtgctcaggatttctcctccgcactgagggcatgtgaaaatggttgcttcgaagtccttctggacctcggcgtcagaggttttgtcctcgtacgcgtaagggtcgaaaagtgaatgacagtattcacaggctaactggcctgatttgatgtcaaactttacatttccaccgcaatttttacatgcgaacattttgtttctcctttctattcccttttacttttttatctgcttgaataaataattccttccagattgacggatggaagaggatgagcagtggaaacagttcgagtcttccggcaagcatgtcaaacatcagtacatatttggagaaattattaaaaaagccgaaattgcatgtcggaccgaccagagaaagacccggtccgatattgttaaatgtagctgcgacagccgtgaaattggtagtgaaatcatagttttccacggaaacaagcagcagtgaaacaataaaaatgacggcgtacgtcatgaaataaacatttattgacctgataacatcatggtctacaggcttgtgctcaaaggtgagctttttcacactctttgggtgaatgtagccatttaactccttacgtattgtctttacagcgatgacaatacgcgataccttgatacctccgccggtgcttccggcacatgcgccgatgaacatcaaaagcacaagcagtgtctttgaaagctcaggccatctgtcgaaatcggtgctcgagaatcctgttgtcgtgatgattgagccaacctgaaacgctgcctttgtgattgcatcgaacacgccggtgcacatatgcgcgatattcacgcttatgactacaacggaggctattatgataccgaaatagtatctgacctcctcaaccttaagtgcgtcacggatgtgaccgaagagaagcaggtagtaagcgttgaaattgacaccgaaaagtatcataaatatggtaacaacccattgcagataaacattatagctgcaaaagctgtcgtttttgataccaaagcctcctgttccggctgtgccgagagaggtacagatggcatcgtacagaggcatttttccgaaaagcaggaaaataatctccatagtcgtaagaccaaagtatattatgtataaaagcctggcagtgtgccgcatctttggaacgagctttccaaccgaaggcccggggctttcagcacgcatcagatttatgttgctgccgcctgaaagcgggatgattgccagaagaaatacaagcacacccataccgccaatccagtgcgtaaagcagcgccagaaattcatgcaataggagagtgattctacctctggcaggatgctcgctcctgtcgtggtgaagccggagatggtctcaaaaagagcatctgtgaagcttggaatctctcctgatatgtaaaacggcagacagccgaatatactcagtacgacccagcccagtgcggttgttgtacagccctccttcaggtaaaaggtaaaattcctcggttttttagccgaaaaaagaaaaccgatagctatgcttatgagtgcaacaatcaaaaagtagatgccgcttttttcataataaataccggcaacaatacatggcagaagcagcaaaaagccttcaagctttaaaatatatcccagaagatatcgaattactgaagtgttcatatcattcccccactattccataatatcctgaagattcgtaaagccggtatgggttgttataatcatgacagtgtcatttttttgtatgctgtcattacctgtagggataataattttgccgtttcggttgatgaagcagatgagcagatgctttttgagctttaggtctcgaagcggtatgtctgtcacatttgagttttctgatacaaagaactcaattgcttcaactcttgagtcgtacatgtggtagagagtctctatattgcagttcatagagtttttctttgcacggacataggcaattatggcttctgaggtgatgtattttggcgagattacactgccaaggtccaggctgtttatgacattggtaaaagttatacgattaagctttgttatgacctttgcattggaaacctgtttcgcatagagcgtaagcatgatgttttcctcgtctataccggtaagaggtacgaatgactggcaggtctctatgccctcttcctttaagagtgcctgttctgttccgtcaccgtttatgatgacagcatccggaagcagtatggaaagctcctcacagcgctcgaagctattttcgattattttgacctttatgcctcgtgatatgagctgctttgccaggtaatatgcggctttgccgcctccgataatcagtgtattttttacgctgtgtgtattgactccgatgtggctgaaaaactcctttgtatgtctgcgttcgccgacaaatgacagtttgtctcccttgcggagcacaaaatcacctgatgggatggtgacctcatcatctctctcgactgcaccgataagtatgttggcatggtgtctggtgcccagatccatgagctttgttccgtcgaggatgctgccctcgggaatctcatacttgatgagctgtgcctgaccgtgagcaaagtttgtcacctcaaggctggacggcagatgaagaatatgagccatctcaatagctgcctcaagctcagggttgataatgagtgcaagaccaagcttgtcgcgcagatatttggcctcctggctgtattcaggcgttctgactctggctatagcagcacagttgccgacctgtgtggcaatggtacagcatagcagattcagctcatcagagcctgtgactgcgattattaagtcggcatcatcaataccggcttcctgcagtatcttgtagctggcaccgtttcctacaatacccatgacatcatagatattggatacctgggaaatcctctccctgtttttgtcgacaattgttatgtcgtgcccctccttgccaagctgctcaacgagagtacggcctaccttgccgcatccgacgatgataattctcagtccctgggagggaaccactccttttttgaacattatttcctccgtatataaaatatataaaaatataatgatatgagggtcaaaaggtattttgcccctcatttatgattgtgtggtggacagaattattatgaccatcatatatcaatggattataacataacgcatatatatttcatagagaaaaaagtcccaaaaatatgagattgtaataaagtataaaaagtgataaaatcgatttcgattgtagtatttgaatagctgtttgaacagcaataagagatagatttttggaggtttaagtaatgacgggatttttaaaggcaaactaccatacgcacacctataggtgccagcatgcatatggcagcgagtgagaatatatagaggcggctatcagaatgggtatcgcagagcttggcttttcagatcatgtgccgtgcccctttaaggatggctatgtgtcgggcatccggatgacgatggagcaggcaccggagtatgtgtatgccatcagggagcttgggaaggagtatgcatccgacataaagctctacgttggctttgaggcggagtacataccggagtttttcaaggagcagaaggctatgtttgacaggcttggctgtgattacatgataatgggccagcattttatgaaatcagagcagacaggcccatatacaggcacaccgacagatgatgagagccgtatacgcgagtatgtggatattgttatagagggcatgaaaacaggcatgtacagctatttagcacatcctgatttaataaattatcagggacttgattctgtctacgaatgggagatgacgaggatgtgcaaggcacttaaggagcttgacataccgcttgagataaacatgcttggtatcggtgcaggaaagcactatccgacagatcgcttctggtgtataccacatgacatcggcaacaaagtgatacttgggcttgatgcacatacagtggacaatatatgtgatgtggaaagctatgaaaaggcacttgatatagtcagaaaatatgacctgaatcttattgaccggattgagatatagttacttacaaaatatcaaataccaaaagtggggaatgctatgattattacagaagaaaaatataatgaggaattaacaagatgtgttttgccttttatcaggcttaattttgaagatggctatatgaagagtgcagatggcacacgcatacattacggctatgtgacgacacctgtagcaaaggctgccatagtcatatcacatggatttacagagtgtatgcctaaatattatgagatgatttactatttcgcaaaggccggatactctgtatatatggtggagcatcgcggacacggcttttcggaaagaagtgtatcagatatgagcatggtcactgtaaacagttttgacgattatgtgagtgaccttgatatgtttatccgagagattgtgatgaagcgtgaggggcgcagaccgctttacctgtacggtcactctatgggaggcgcgatagctgccctgtatcttgagaagcatcctgaggtatttacaaaggcagtactttcaagccctatgatagagatgctttatggcaatttttcacattttgccgtggaggcgatactgtttgtcgcaagtgtgcttaactggaacgataaatatctgccgagccagacaccgtatacggatgagtatgattttgaatcgagctgttgtctgtcaaaggcgcgctatgactacatatacaagtgcaaggtggaggaggaacgttatcgtacaaatggcgccacctacagatggtgcagggccgggcgcaaggcatccaaatatataaagaagcatgcacaggaaattaaaataccggtgctgttatgtcaggcgggaaaggattatctggtttcaaataccgctgaggatgaatttattgcgaagctgcctcagggcattaagaaggtctatcctgattcaaagcacgagatatttaatgcggatgatgataccttggaaaagttttactcagatatctttgatttttgggcttgaacatgaaaatgaaattcgtcaagtgaaaaatgtgacataaaaaatcatttgttttgttagaaatgacatatggatttaaaatacaatatatagtataatcacaactgttgcggacaagatgttagtatttaagccgatggtaaaagtacgtaaagcatagcccgtatagagaaaaataataaaatatatcaatattgtaacaggtaaatatactatcaaacaaatgtgaggagaaagagaatgtcagacgaagttttagatgatgtaatgataaagggttcatgtaagggaaaagcagatgctattgtaaattgccagtgcaatatcgagagtgcaccggtcagatgcgagcaggcagaaagatgtatgttctattcttattataagtgcagcaagcagtggaagaggcttgcgtagtcaaagttaaagattaaaagctccgggctgacaatgaagtcgccatggagcttttttgcgtatataaagaaaaaaatattttacacgcggaaaacttatgataatatataaaaaaggtaactattcagaaccactgagaacaaaaaggctgatgcgtcatgctcgcatgtaagcggcagatttttttgttctcaaggtggctctggatggatacgtaaaacaagatataggagagacgcgcatgaagagagttttggtactgagtgattcacatggtaatgtgggaaatatgattcgggcagtcaaaagagaggaacctgatatgatacttcatctgggagactgcgttgtggatgcggatgcccttaggagagagttccctcatataaccatggtcaatgtgccggggaactgtgatttttcacggggagatacagagagacttattgatatcgacggctataaggtactcatgtgccatggacatacatatggagtaaagctgtcatatatgcatctggagcttcatgcgaaggaaatcggggcagatctggctctctttggccatacacacaagctgttttatgataagcacaatggtcttgcgatgatgaatccgggaagcatcggtgcaccgctgtggggctgcatgccatcatacggtatcatcacatttgacaaagaacacgatgttatgaagcttgatgttgactacattgagtattgacgaatgatttatcaaagcggtataatattggctaatacagttatttatataggaagcagaggaaaaacagacaaatggtaaaggtagtaaagtttggcggcagctcgctcgccagtgcagagcagttcacaaaggttggcgacatcataagaagcgatgagtcaagaaaatatgttgtgccgagtgcaccgggaaagagaaattccaaagacacaaaggtaacagatatgctttatgcatgctatgatctggctgagaatgatcaggatttcaaggttatgctcagaaaaatcaaggacagatatgattcaatcataaatggccttcatttaaagctggcgcttgatgaggagttcaagattatcgctgagaatttcaaggcaaaggcaggtgcagattatgcagcctctcgtggtgagtacttaaacggaatcatcatggcaaactatctcggatatgagtttatagattcggcaacagtcatcttttttgatgagaatggcaattttgacgcggaaaagacagacaaggtgctctcaaagaagcttgagcagacagaaaaggctgttattccgggcttttacggagcaggacctgacggaaaggtagttacattctcaagaggtggttcggatatcactggttccatcgtgtcaaaggcatgtcatgccagcatgtacgagaactggacagatgtttcaggctgtctcgtagctgatcctagaattatcgacaatccacagccaatcaaggttgttacttatagagagctcagagagctttcatatatgggagcatcagtgctccacgaggatgctgttttccctgtaagaaaggcaggcatcccaatcaatatcagaaatacaaacgacccggaagcacctggtactcttatcgttgagagcacatgtcaaaagcctgattataccatcacaggtatcgccggaaagaagggctttgttgcggtaaatatcgacaaggacaagatgaactcagaggtgggcttctgtagaaaggctctccaggcgtttgaggagaacggtatctctatagagcatatgccatcaggtatcgatactatgacggtattcgtacatcaggcagagtttgagggcaaggagcagcaggttatcagctcaatcagaagacttgctcatcctgatatcattgacctcgagtcagacctcgcgcttatcgctgttgttggccgtggcatgaagtcaaaccgtggtacagccggcaggattttctctgcacttgcacatgccaatgtcaatgtgcgcatgattgatcagggttcatcagagctcaatatcatcatcggtgtaagcaatgatgactttgacaaggcaataaaagccatctacgatatttttgttgttacacagctgtaataagctacggagagattatccgttggaaccgaaattgaataggataatttaaaaatttaatgtagaatttataaaaaatacagggcttggcggaatatatgccaggctctgtattttttgaataggtaaagctttgaaaaagctttatgaggatgctttaggcgggaaaacaaaataccctcacataagctgaaaatgcgcatatattatagcgaaaggaagaagttattatgcaaaaagacactataatatatgttacggatcagaggcaaaagtacctcgctgatatgctgggaggagaacagacagattgcagaaatagcggcgggattgattatgagcgtgttgggaatattgtgtttcctacaccgttttcaaagcttaagcttataaatagtgatatagaaaaattaaaacataatataataattaacaatattgcagtgtggggcggtatgatgccggagtgcttccccggtgttgacaggggctgtgactttatgagagatgaaactgttatagagcagaatgccattgttacggccgaggccactgcgtccatagcgatacaaaaaagcatacatggtatatacggctcaaaggtacttgtgagcgggtttggaaaatgcggaaaggcaatggcccgcgttttttctgctatgggagcccttgtcatggtgatggcaaggagaaaacaggcaaggtgtgaggccgctgaactgggatatgaaacggtggattttaatgatcctgccaaggcttgttttgaaacactgtttctcataaacacagtaccggatagggttatagatgaaagtttaatcatgattttgcaaaaagatgcgataattatagacattgcatctaagcccggcggctgtgattttgaggcctgtaagaggtatcagataaactgtacgcatgcgctcggtcttccgggcatatactgtccgaaaaccggtgcaaaaatactttatgactgtatgaaaagaaaaggtatgacggagggcttatggttatttcggattgcaccgtaggaatgggaattacaggctccttctgtagttttgaaaagactaaggatgttgcaaagcggcttgtggatagcttcacacatgtgacacctgtatattcctataatgcacagatgatgaacacgcgctttggaaaggcgggagactttatgcatactatctccgaaatcacaggggatgagggcatcaggacactgcaggaggcagagcgtgtcggcccgggaaagctgtttgaggtgatggtgatttacccatgcaccggcaacacagcggcaaagcttgcaaacggcatagtggacacaccggtccttctcgcggcaaaggctcatctgagaaacggcagaccgcttgttatcgggatttccacaaatgatgcgctcggcatcaactttaagaatatcggaaagctgatgaatatgaaaaatatttattttgtgccgtttgggcaggatgactgtgtgaagaaaccgaattcactcgtgtgcgatggaaaacaggttgtcggcacaataaatgaagtgatggccggacgacagattcagccggtaatcctctagagtggggtaatacgttatggcataaataaatataagaaaagatttatgaatctgaatcattgctgttcacactgttatgtgtgaacagtaacttctgaattgaaaaactgagtttgaaaatgtgaaaaaacatagtaaagatgtaaaaatatatgttataatcatgtatacacaaaaaaactgaaaacacaggaggataaaatatgtcatatatttacaaaacaaaaggaacctgttcaacacagattgagcttgacctcgatggagatgtagtacataacgtaaagtttacaggaggctgcaacggaaatcttaaggccatcccaaagctcgttgaaggactcacagttgcccaggtagaggaaaaaatcggtggaattaaatgtggatttaagaatacatcctgcggcgaccagctcgcaaaagcatgccgtgaagcatatgaagcccagaagaataactaaaaaataggcaactccaaaaagctctcccttgtggagagctttttgaattgaacataattctgccatgcttcgcgcaaaacaaagtgaatccgggaagtacacagtgtgttcagaataaaaaagttcatattttttatgaggaatatactgtgtgctcacccggacctcacagcctcacacgcgaagcccccattaaagctcgacactcccacaaatatttttataaaatgtttacaaaacattcatccctttaggttgtgcaatcatcctcaaagtgttacaataacactattgtgagcctgtacaagggcaatttgaagttataggagaaaaatatgagcgcattatcaaaaatcttcggttctcacagcgagagagagcttaagagaatttacccgattgctgacaaggttgagtcatataaggaggcaatgggaaagctttccgatgaagaattaaaggataagacaagggagtttaaaaagcgtctggaggacggagcaacacttgatgatattcttccggaggcatttgctacagtaagagaggctgctaagcgtgtgcttggcatggaacattatagagtacagataatcggtggtattattttgcatcagggacgtattgcagagatgcgaaccggtgaaggtaagacacttgtttctacacttcctgcataccttaatgcacttgagggcaagggtgtgtgtattgtcacagtcaatgattaccttgcaaagcgtgatgctgagtggatggggcaggttcatgagttcttaggacttaaggtcggcgtagtacttggcggcatggacaatgacgagcgcagggaggcttacggctgtgatattacatatatcacaaacaatgagcttggatttgattacctgcgtgacaatatggttatctacaaggagcagcttgttcagagaggtctccactatgctatcatcgatgaggtcgattcagtgcttatcgatgaggcacgtacacctcttatcatttcaggacagagtggcaagtcgacaagactttacgaggcatgcgatatcctggctacacagatgaagcgtggtgaggatgttcctgagtattcaaagatggatgccatcatgggcattgtccaggacgagaccggtgatttcatcgtaaatgagaaggacaaggttgtaaaccttacgcaggatggtgtgaaaaaggtagaacagttcttccatatcgagaaccttgcagatccggagaatcttgaaatccagcacaatatcatacttgcgcttcgtgcgcacaacctcatgttcaaagatcaggactatgtggtaaaggatgatgaggtgcttatcgtagatgagtttaccggacgtatcatgcctggacgccgttattcggacggactgcatcaggctatcgaggcaaaggagcatgtaaaggttaagagagagagcaagacccttgccacaatcacattccagaacttcttcaataagtttgacaagaaggccggtatgacaggtacagctctcacagaggaaaaagagttccgtgatatctatggcatggatgttgtcgagatacctacaaataagccggtagcgcgtattgatttgcaggatgctgtatacgctaccaaaaaggaaaagttcaaggcagttgtggatgcggttaaagaggcacatgaaaagggacagcctgttcttgtaggtacaatcaccatcgagacatcagagcttttgagcggcatgctcaagagagagggaatccctcacacagtattaaatgccaagttccatgagaaagaggcagagattgttgcacttgcaggacagcacggtgcagttacaatagcaaccaacatggcaggccgtggtaccgatattaagcttgacgatgaggcaaaggctgccggaggtcttaagattatcggtacagaacgccatgagtcaagacgtatagacaatcagctccgtggacgtgcaggacgtcagggagatccgggtgagtcacagttcttcatctcacttgaggacgacctcatgagacttttcggttcagagcgtctgatgggcgttttcaatgcgctcggagtaccggagggcgagcagatccagcataagatgctcacatctgctatcgagaaggctcaggagaaaattgaggccaacaactttggtattcgtaaaaatcttctcgagtatgaccaggtggacaatgaccagagagagattatctacagcgagcgtatgaaggtgcttaacggtgacaacatgcgtgatgctatccttaagatggttcaggagcaggttgagaagtctgttgacagatgtatttccgaggaaattgacagagctgactgggatcttgtagagcttaacgagcttgtgcttccggttattcctcttgatccgattacaaaagaggatattgagtcgatcaagaatgcaaagcagcttaagcagtacttaaaggaaaaggctgttatgctttatgagcagaaggagacagaattccctgagcctgagcagttcagagagattgagcgtgtcgtgcttcttcgtgtaatcgacagaaagtggatggatcacatcgatgatatggcacagcttcgtcagggaatcggcttacaggcttatggacagaaagatccaatcgtagagtacaagatggcaggctttgatatgtttgacgacatgatttcagctatccaggaggatactgtcagactgctgtatcatgtacaggttgagcagaaggttgagcgagagcaggttgcaaagatttcgggcacaaacaaggatgagtcagcacagaatgcaccaaagcgccgtgcagcagccaaggtatatccgaatgacccatgtccatgtggcagtggcaagaaatataagcagtgctgtggacgtgtgaagtaaattttaaatggctgtaatcgttgctggtcacactgttaggtgtgaacagtaacataaaataaataaacaagaacgaatgttctaaaattgtggacaaagtcgattttttgtagtaaaataaagcacataagtgcatactataaatgattgactttgtctttttataattttacaaaagcagtatttaagatttttttggaggaagcgtgcgttatggaatttaaactgcattcaaaatacaagccgaccggcgaccagccgcaggcaatagagcagcttgtgaagggatttaaggagggcaaccagtttgagaccttacttggagttaccggctccggcaagacctttaccatggccaatgtcatacagcagctcaataagcctacacttatcatatcgcacaataagacactggcggggcagctctatggtgagatgaaggagtttttccccgaaaatgcagtagagtactttgtctcctactacgactattaccagcctgaggcttatgtgccgcagtctgatacgtacatagccaaggattcctctgtaaatgatgagatagataagctcaggctttcagccacggcagcgctcacagagcgaaaggatgtcattgtcgtggcatcggtttcctgcatatacggacttggaagtcctgatgagtggacaggcatgagtatttcgctgcgcccggggcaggagagggacagggatgatctcgcgaggtctctcatagatttacagtacaccaggaatgatatggattttcaccgaggcaccttcagagtgcacggtgatgtgcttgatatatttccggcaaatgccgatgatacggcaatcagggttgagtttttcggtgatgagatagatcggatagtggaggttgatgtgctgaccggcgaggtaaagtgctcgcttgagcacacgatgattttccctgcatcccactatgtagtttcgcaggagaagataaatgaggcctgcctcaatatagagaaagagcttgatgagcgtgtgaagtattttaaaggcgaggacaagctcatagaggctcagcgaatagcagagaggaccaattttgacatagagatgatgagggagacaggcttctgctcaggaattgagaactatacgaggcatctgaactttgcaaagccgggggagcctcctatgacactcatagatttcttcccggatgattttctcataattgtggatgagtcacatatcacgattccacagataggcggtatgtatgcgggggaccgctccagaaagaccattcttgtggactatggcttcagactgccctcggcccttgacaacagacctctcaatttcgaggagttcgagggtaaaatagaccagatgctctttgtctcagccactccgaataagtatgagaatgagcatgagctgcttcgtgcggagcagattatcagaccgacgggacttttggatcctgagatatcagtgcgccctgttgagggacagattgatgaccttgtgtcagaggtcaataaggagactgcaaaccatcacaaggtgcttatcaccacactcacaaagcgtatggctgaggatctaacaaactatatggcagagcttggcatcagggtaaagtacctgcattcagatatagatacacttgagagagcggagataatacgtgacctgcgtcttgacgtatttgacgtgctcgtcggcatcaatctgctcagggaggggcttgatatcccggagattacacttgttgccatactcgatgcggataaggaaggcttccttcgctcagagacctcacttatacagacgataggacgtgccgcacgtaacagtgagggccatgttatcatgtacgctgacaagattacagactccatgcgtgtcgcaattgacgagacaaagcgtcgtagaaaggtacaggaagagtataatgaggctcacggcatcacaccacagactatacagaaatccgtgcgtgatctcatagctatctcaaagaaggtagcggccgatgagaatgctcttgacaaagatccggagtcaatgagcaaaaaagagcttgagaagcatattgcagatatagagaaaaagatgaaaaaagcagcggcagagctcaatttcgaggctgctgcagagtacagggataagcttattatgcttaaaaacacattgagagacgtaaaataaaagcttataacatccggaagcaatttggaggaacacaaattatggcaaaaaaagaaagaaaatacatcaaaatacgaggtgccagcgaacacaatctaaagtgcgtcagtctcgacatcccgagagatgagtttgttgtttttacagggctttcaggctccggcaagtcatcactggcatttgataccatatatgctgaggggcagcgcaggtacatggagtcactttcatcgtatgcacgtcagtttttaggacagatggagaagccgaatgtggagtctatagagggacttccgcctgccatttccattgaccaaaaatccaccaacaagaacccacgttcaactgtcggaacggtcacagagatatatgattacttcagactgctttatgccagaattggaataccacactgtccgaagtgcgggcgtgccattacaaagcagacgatagaccagatggtggatactgttatggcactgcctgagcgcactcgtatccagcttcttgcaccggtggtcagaggccgcaagggcgagcaccagaagctgttcgagagagccaaaaagagcggatacgtgcgtgtgattgtagatggcagcatgtatgagctctctgaggatatcccgatggagaaaaatataaagcacaatattgatattgttgtagaccgtctggttgtaaagccgggcatagagaagaggcttactgattcacttgaaaatgtatttgaactgacagagggcaatgccatagttgatattgtggatggcgaacagatgaccttttcccagaattttgcgtgccctgactgtggcataagcatagatgaggttgagccgagaagcttctccttcaataatccgttcggagcatgtccgacctgctacggactcggctacaagatggagtttgacccgcagcttatggtgccagactcatcgctttccatatctgagggcgccatacaggtgatgggctggcagtcatgtacagacccaaagagctatacctatgcgacacttcgtgcgctgcatgagggctatgggcttcctctcgacacaccgattgatgatttatctgcagatatgaaaaaactgcttttttacggtggagacggcagagtgctcaaggtcagatacaaggggcagagaggcgaaggcgtctatgaccttgtatggaacggccttgtggacaatgttgagcgccgatacaaggagaccttttctgatacggcaaaggcagagtatgagcagtttatgcgcattactccgtgtacgagctgtaaggggcagaggcttaagccgtcgtcacttgccgttacggttgcggacaagaacatatatgagatgacctccatgtctgtgaaggagcttgtgaagttccttgctgatatagagcttacagagcagcagcactatataggagaccagatactaaaggaaatccgtgcgagggttggctttttgcagcaggtcggccttgattatctcactcttacccgtggcacggcaagcctttcaggcggggaagcccagcgaatcaggcttgccacgcagataggctcaggacttgtaggtgtggcatatatacttgatgagccgagcattggcttacatcagagggataacgacaagctgcttggtgcacttatgaatcttaagaatctgggaaatacgctcatagttgtggagcatgatgaggataccatgcgtgcagcggattatatcgtggatgtaggaccgggagccggttcacacggcggagagatagtggcggcaggctcgttaaaggacattataaagtgcaaaaaatcactcacaggagcatatctgagcggtaaaataaagataccggtgccacaggagaggcgcaagccaagcggatatatcacgataagaggagccagggagaataacctgaaaaatattgatgtgcagatacctcttggtatcatgacctgtgttacaggcgtgtcgggctcgggaaagagctcattgaccaatgagatactctacaagcatctggccaaatccttaaacagagccaggtgtatcgcaggtgaccacgacggtatagatggtctggaacagcttgataaggtcatagacatcgaccagtcaccgataggccgtacaccccgctctaatcctgccacatatacaggtgtgtttgacatgataagagacctgtttgcatcaacacctgatgcaaaggcaaagggctataaaaagggccgtttcagtttcaatgtaaagggcggtcggtgtgaggcctgtggcggcgatggaatccttaagatagagatgcatttcctgcctgatgtatatgtgccgtgtgaggtctgtggaggcaaacgatataacagggagacgctcgatgtaaagtacaagggcaagagtatatacgatgttcttgatatgacagtggaggaggcacttgagtttttcaaaaatgtgccaaagatccagaacaaaatccaatcgctctatgatgtcggactatcatacgtgaagctgggacagccgtccacagagctttcgggcggtgaggcgcagcgtatcaagcttgccacagagcttagcagaaagagtaccggaaagaccatatatatacttgatgagcctaccacggggctgcactttgcagatgtacacaagcttgtggagatactgcgcaggctctcggacggaggcaatacggtggttgttatcgagcacaacctcgacgtgataaagacagctgactatatcatagatatgggacctgagggcggagacggcggcggaaccgtcatagcgcagggcacacctgaggagatatgcgaggtaaaacagtcatatacaggccgttttttgaaacaatatctggaaaaagacaaggataaactttaaaattttattaaatatgacctttttcaaaaaaaaagtttgaaaaatgggatttattgtatataataagagagtgtatgtgtaaatttaaagatatggcaggaaaggggctattaaaatggtcggatcagatatcggaatcgatttaggaacagcaagtatacttgtttatataaaaggaaagggtgttgtgttaaaggagccttcagtagtagcctttgacagggacaccaacaagattaaggcaatcggagaggaagcacgcctcatgctcggaaggacaccgggtaatatcgttgcagtcagaccgctgcgtcagggtgttatctcagattatacagttacagagaagatgatcaagcacttcatccagaaggcgcttggtaagaagagcttcagaaagccgctcgtgagcgtatgtgtgccaagtggtgttacagaggttgagaagaaagccgttgaggatgctacatttgcagcaggagccagagatgttaagattatcgaggagccaatcgcagctgcaatcggtgcaggtattgatatttcaaagccgtgcggaaatatgatagtagatatcggaggcggtacatcagatatagcagttatctcactaggtggttcggtagtcagcacatctatcaagatagccggagatgattttgatgaggcaattgtcagatacatgagaaagaagcataaccttctcatcggagagagaacagctgaggatatcaaaatcaagattggtacatgctaccctctcccacagccggagacaattgaggtaagaggaagaaaccttgtaacaggacttccaaggactattacagtcagctcagaggagacagaggaagcacttcgtgaggcaactcttcagatagttgaggcagtgcactcagtgcttgaaaagactccaccggagcttgcagccgatgtcgcagacagaggaatcgtgcttacaggaggcggttcactgctcagaggtcttgaggagcttatcgaggaaaagacaggcatcaatacaatgactgcagagcagcctatgacatgtgttgctatcggtacaggaaagtatgtagagttccttgcaggcaagagagatgaagaattctagaatatacgttttataacaggcagccgtgagggcgatgatatgtccctgcattgcaggaatgtattgtcgcttttttgttaatattgttacaaatgggaatattacagtcagggggattagtgaacaaaataaaggatattgggagaggtgtaatcaatctggtatttccaccgcgctgtccggtatgtgatggtataattggtccggttgagagatatatacacagcagatgctgtgaaaagctctttccggttgagcagccacagtgtatgcgttgcgggaagccggttttgtctgagcgaagagagtattgtgacgactgcgcacgggcactcgagcatcacaggcagatgcgggaggatgacagctacaggcagggcaaggcgctttttgcatacaagggcagcataaagcagaccatgtacaggttcaagtattcaaacagacgtgagtatgcggcttattttgcacagacagcagtggaaagatattcggactggatactaagctgtgggatagatgttattattccggtgccgatgcaccgtaaaaaaatgcgccagagaggctacaatcaggcagagtgttttgcaagggcattgtctgaaaaaacaggcataaggatggcaaaagggcttgtgcgcagagtgaaaaataccagtccactcaagacaatggggtatgttgaacgcagaaattgtctcgagggggcttttcaagtggcggatagtattgtacaatatgaccaaatactaatagtagatgatatatatactacaggcagtacggcagagtcgattgggcatgagatagcaaagaaatgtcctggccgtgtatatgtgctgtgtatttgcataggacagggaagttaggagggttttatcagatgagaatatctaattgtaagggctgtggcagaatatttaatgtactgtcagatgagcagtactgcccgaactgccagaaaaaaatggatgagaaatttgatatagtaaagagatttgttgaggataatccaaatgtgccggttgagacagtggccaaggagacggatacatccatgaagcagataaataggtggatacgtgaggaaaggctttcgttttcaccggattcatcatatggtataccatgcgagaactgtggcaggatgatacgtacaggtagattttgtgatgagtgcaagactaagctcacaaacacactacgcagtgcccttgacacaccaaagagccaggataggcagctgtggcagcaggatgacaaaaaccgtatgagatatatcaagtaacaggtaagaggatgatttatgataaacgaagaaaaagtaagggaactgtttaatattgctctatgtgacagcaaaagcgatgacagccgtgtgcagaagcagtccgcaagctattacggatgggactatatatggaaagagggcttaaaaagcttctttacaggtacattcgcatttgcagggcttgttgtgatgtgggttgctgtcaatgcagcagagcttttggacagaatcaataagcttgattttaaggcaatgggtgtcacaataggcatactgtatattgcatttatggcggtttacatttttgtcacaattgtggtgtatactgcaagatataaggccggcagaagagaagtgcgcaaatacgcaaatcacctgaaggcagtgggcagaatatattcccgtgaggaaaagattaagcgttagggaggctttatgaacaagttactggaaattaaggataaggcagtcaaattttgcggtgagtatgagcactttatacttccggttgtgagatttgccgttgcatttatcgcatttataacaatagatttgaatatcggctatatggcgaaaataagctcgatgcttgtggcactgcttttagcgcttgtgtgtgcactgcttccggtgaatgcaatactctggattgcttcgattatgatacttttagatatgtatgcgctgtccatagaggtttttgctatcacatttgtactttttttagtactgtattttgtctatttccgttttgcaccgaaggatggcatgcttgtgatactcacacctatatgctttcagcttcacataccgtctgttatgccggttgcagcaggtcttttaagaagagcttattcggttgttgcaataatatgtggcacactgttgtactatttctttgacggaatcagacagaatgcatcagcgcttgcagaggtggtagataaaaaggggcagagcactacaaagctcaatgtgacaatgggacagcttcttgacaacaaagagatgtttatagttatggcaatctttgttatcaccacactggtggtgtatcaggtcagacgattgaaaatcaacaattcatggactgttgctaccatagcaggaggactcatacagttggttgcacttgttgttgcttatctggtgctcggactgccggagaagataatctggcttgtgctcagcactgtagctgctatttttgcaggtgttgtcatacagtttatatttatgaatcttgactatgcacgtacagaaaacgtacaatttgaggatgatgaatattactattacgtcaaggcagttccaaagaagatgattgccaaggaggaaaaggttgtaaagcactttggcaatacaggaagccttggaaagaagattccgagacataatcaggaaaatatcagcaaagaggctattgcaaaagatctcgaaatagacgaaaatatatttgaggatgacaaatagttacatagtataagagaaaggagggcgctatggataatgtgagtggtgtattgatacgcttcaaggatcagttccttacattcacaaatgtgccgggcatcaaaatcggtgtgatagacattatagagatacttattatttcagtgctcttctatcatatacttttgtggataaagaccacgagggcatggaatctgttcaagggccttattatcatactgttgtttgtgcttgttgcagcattgttccagatggatacaatactttggcttgctgagaaactctttaatataggtctcgtggcacttgttgttatttttcagcctgagcttcgaaatgccttggagaatattggtggaaagacctttttgggtgatttttttaataccggcagaggcgaaattgagaaattctccgacaagacaatcgatgagctggtgcgtgcatgctttgcgatgggcagagtaaagacaggagcgctaatagtcatggaggatgagataaatctgggagagtatatcagaacaggaatagatgtggatgccatacttacaagtcagctcctcatcaatatttttgagaaaaacacaccgcttcatgacggagcggttatcgtgcgtggcaaccgtgtggtgtcagctacatgttaccttccgctatcagacagcctgtcactctcgaaggatttgggaaccagacaccgtgcagcggtcggagtcagcgaggtaagtgattcgcttactatcatagtttcagaggagacaggatcagtttctacagcatacaaggggcagattgagcacgatatagatgccgatcatctacgcacacagcttaagcttctgcagaacagacatagggagccgggtaaatttgaattaattaaaaggaggtttaagaatgggaaagaagcttctaaaaaccttcacaaataatataggctttaaaatacttgcgatagcatttgcatttatactctggcttgtggtctacaatctcaatgacccggtcaagacaaagacatttaccacaacagtcaccgtcacagggcgcgattcggttgttgacaaggggctatggcctaccatcaaggattcggaaaagaccatcagcttttcggtatcaggtaagagaagctatctgaacgagcttgatgattccgatttttacgcaaatgttgaccttgcaaatatcatagtagataaggatgatacgaataaggcaagcgtaaaggtcgatattggatgcactaagtacagacattcgattaccttcaacggtggagaccatatgctcccgctttcagttgaaaaatatatgcagaagcagtttgaggtaaaggtatcagtggttggaagtctctcaggtgcgaaagcactgggaaacaagccacaggcaaatccaaaggtagtaaagatcggaggtcctgagtcagttgtttcaactatagcatcggctaatgtaaatataaaggtcgatgacaataccataatatcagataatcagataactgatcgcggtgatctcactctgattgatgataatggcgatgagatagatatatcaaagcttgatgtggacagccagtatcagtctatagcagtgacagttgatgtcttaagtaccaaggaggtacctatcaagtgtactacgacaggctcaccggcaggaggaaagagcgtgctcggagtagaactatcagaggagtctgtaatgctcaagggtaatgcagaagcattgaacaatatcacatctatagatgtgggcccaatcgatatatcgggcgcaacagacgatataagtacatctgttgacctgacaggatatctgccggatggagtttttatagtgaactcatacaagacaaagctcagtatagatataaaggttgaaacaaatgcgacttcaaccatgacgctgaacagctccaatatcacatatgacggactggaagatggatatacgcttacatttgtaacagataagagcagtgtcgtagtaagcggcacccagtctgatatagatacgctttcgggaactacactgaagggtaaaattgatgtgacaggccttgatgcaggtacacatacagtgacggtaaagccaaatctggatgagaccaagtacacatggggcgagataaaggttcagatagttatcggaaggaaaggtgacggaggcggcacaacgggaactgatggtacaggaacagcctcgggctcaataacaggcggtacaacatcaggcaacaccggatcaggcagcaccggcgcaggtggttcatcatcagctggtacgtcatcgggcagcacatcgtcaggaaacaccggaaataacggctctgacagttcatcacattgatagatatataaccgaaaagaggtaataaaagtggtagcacaaaaaataataatcaagaatcctaccggattacatttacgtccggccggcaatctctgcaaagaggcaatgaaatttaaatcaaaggtaacatttatatatgacgagaaaaatgtagctaatgcaaagagtgtactttcagtgcttggagcatgcataaagtcaggcgatgagatagagcttatctgcaatggcgaggatgagagtgaggcgcttgaatatcttatacagtacatcaaggatggactcggagagtagtacacaaggaaacaggtatacatggagaaacatatatggagaagcttttaaccatagtcgttccggcttacaatgttgaaaagtatataaagaactgtcttgactcgtttatagatttgtctgtgctcagaagtctggagatactcatagtggatgatggttccacagattccacagccggcctggcacatacctacgagcagaaatatccatacagcttcaaggtgctctctaaggagaacggaggccatggatctaccatcaactatgcgataccgcgtgcaacaggaaagtatttcaaggtggtggatggtgatgactggctggacaagagccttctgccacaatttgtacagcttttgaagcacacgcactcggatgtcatatccaatgacttcaacctggtggatgataggacaaagaaggtcacaaagcgcagaaaggcagtgtccaactcttatcactacaacagggagtggggctttgctgaggcagtcatggacccgctgatcactatacattccatgaccatccgtactgatgtattgcagaagaatgatattcgtgtggatgagcactgcttctacgaggaccaggagtatatactctaccctataccatactgcacaagcatcacgttttcacctctgccgctgtatcagtacagacttggaaggagtggtcagagcgtggacataaagatgatgatcaagcgtcatgaccagcatcttaaggtgcttgatgcactgtttgagtacaacaacgtgcacggtaatctgcagacctacaagaagcagtaccttgagcgcggcatagccgaggcagtcgatgatgagtaccagatatttctggcaaagggcaatgatacaagaaacgttgagcagatgaagaagtttgacgagatgctgcgtgaggagcacccgggagtgtaccaggcgtgcagcaggaagagcgtctggatgcttagaaaaacaggttttaagatatttccgatggcagcatgggtctatagcagactacgtggtaattaatttcatgaataggcgttaatgagtatgcaatactctttttaataatagtaatcaggacggatagaacagttaatgagtaaaatattatcaatcataataccaacatataatgcagaaaagtttctgaataaggggctgtcgtcatttctggtatgcagggatacagatgcacagacagcacagcacaactgtaaaatggcaacggagggctgctttgaggaaatagatattgacaaggctatactcgataagcttgaggtgatagtcgtaaatgacggcacacctgacagaagtgttgaagtggcgcagaaatttgtggactggtatccggatacctttgtcatagtaaataaaacaaatggtggacacggttctgcaatcaacacaggagtggagcatgtgagaggaaagtatttaaaggtggtcgatgcggatgactgggtagatacgcttgcgctaaagcacctggttgaatatctcgagcatgtagattcggatgcggtgatacaaagcttcaggtattatgacatatcaaaggatgagtacagaccggcagatgtgagtgtgcctgattttacacgagagtacaatttaaaggatatagtaaacatgtgggatgatgtatttgatggactatcatttcacggagtgatatataacacagggttctataaagcacttggatataagctcacagagcatgtattttacgaagaccaggagtatgcaaccgttccgttttcgtatgcaaaaactgtcagatttattcaggaagagttgtatgtatacagagttggagatgtaaatcaaagtgtttcagcagcgagtcaggtgaagcgtcttccggatctggagcaggttatatttaatgtacttgaggcagagaagagctttgcaaaaatgccacaaggtggaaaggaacactttatcagaaagacgtcgggcataatcacaagctattatcaaatagctttgataaaaaataccgacagacaatccggcagagcgatagtagagcagtttaacatgaaactcgctcaaaaaagtgcacttatgtatgaggcagtacagcgtaaatataaagtatttcgtatgtttaataagctgcatgtgagcaacagcttttacgagaatcaatttgcaaagctgcttgagtttgcaaaaagggttggcagagcagacagactatacagaaaataatactgactaccattgtcaaatatggtgacagacagcgatataagtggaaattaacatatagaaacaggaattagataggatatggaaacagaaaataaaaagatactatcaataataataccgacatataatgcggcaaagtttttggataaagggttatcatcatttattattgatgataactctcttttaaatatgctggacattgttgttgtaaatgacggctctaccgataatagtgtggagattgcacaaaaatatgtaaataaatatcctgacgtgtaccggatactgaataaagaaaacggtggtcatggctcggcaattaatgaaggcgtaaaaataataaaaggaagctattttaaggtagtagacgctgatgactgggtaaacactgatgtgttgaaagaaactatctgttatcttagagataatgaaaataaacatgagaatttcgcagatgcagtgctgatgagctatagatcatatgtgctgcagagagaaaatactgatgagtatccatacgacgataaatatataacaaaaaatggtggaccatataatgcaggatatgtggatgagcatctgtatgatttctggtgggggctgagcctgcatggggtgatatataatacgcagttttatagaaatacaggactgacactctctgagggggtattctacgaggatcaggagttctcaataatcccaatggcatatgccgaaagtatctatgcatatgataaggcactttatgagtatagagtcggtgacgtaaatcagagcgtttcgatagaaagctcactgaagaggcttgaccattatgagaaggttatcatgaggctgattgaggcaggccgggatgcggagcactttagtataggcggaaagcagctgtggtttgataaaacaagcaaatttatcaacgactatttgcagctttgcctgattaggaacactgataaaaaacagcttagaaaaaggatgaagctgtttgtcagtcaaatcgaaaaaaagaatacagatatgtataaatgtgtaaataagaattataaagtattttgtgcgttgaataaaatgcatatgagcgataaggtttatcagaactattttatacgcctgttacatattgtgcgtcattaggaagcttttttgttatcataatgatgaataatgtgtctaaataaccggaaaatatgtgacaaatctcacttgaggcatatataagaaagtgataaaatatggtgctgtgagaataatataaaattaagataaagaggacaaagatgaagaagaaaagtataaaactcctggtagttttggcctgtgtgcttatggcattgggaatggcaggctgtggaaagaaagcatacaagacattccctgaaaagtacaagcttgcatcagttgatgtaggtggaatgactgctgacgaggcaaagaaagccataaagactgcagtaggcaagtataagatatcagtgaagcttgacgatgcatcatttgatatgacagctaaggatttgggactcaagtacaatgacaaagcagatcttcaggaactgataaatgcggccaataaggataagaaaccggaaaagcaggtgaagctttttaaaatggataagtctgatgagctggagactgctcttgtagactcttatatcactgcaaaaacacagtcacagtctgatgctacggcacagagtgatacggatgcagaggcaaatgatgacgaacaaaagaaggctgaggcagacacacagacctttgatataagatcaattgtgccatatcgtgctacaatagcatacaatgcagaggcaggacagtttgagggtgttgacggtgtatcgggagatgcacctgtatatgacaatgcagctacaaatctgacaagcgctgtaaaggagctgaaggataaggtagagcttacatctgcaacaggatatgttgatggagaaaaggctgcggacagcgagctggtaaagaaggcattaaaagaagccaatgcatatcttgatgtgacggtgacatgtaatttcacaccggcaacaggtgaagcagctacagaggctgtaggaaaggatcagatagcccagtggcttatagtgggcaatgacggattgtcagtttcacttgatggtgagaatatggctacatactgtacagagcttgcaaaaaagcatgatgtgtcaaagaagaaaacaggtcagtttaagactacaggcggaagtataataaatgtgcctgttacatcatcaggacagactgtagatggaaacaagctgtatgaggcgattgctgaggcaataaacaataaaaagtctgcaacagtggaagcagtttacagtgaggcaaaggaagaagaaacaggtgaatatgtcacatatggtggcaattactgtgaagtggatcttaccaaccagatggtatatgtatacaagaatggagagcttgttgtatcaagtcagtgtgttacaggatgtatttcaaaaggtcatggaacacctaccggagtgtattctatcttctcaagagataaggacagatacttaaggggagacggatataagtcatgggttaatttctttataccattcaatggtggaattggattccatgatgcttcgtggagaagtaccttcggtggaaatatctacatgtacagcggcagccatggctgcataaatatgccttattcagctgcgaagaagctatatgagaatgtgacattagatgaaaaagtaattgtatatggtggtgttgacaaggtggccggcaaagcgcagagttttggcggagctggctcttataatgtgacagagggtgacggagcattcaatctcggtgtgacagcagaggataatgcaaagctcacatactcaagtgataatgagggtgtagtgagagtggatgagaacggtaatgtgacgatagtaggtgtcggaactgcaacaatcactgtcaagtctgaggctactacaagctataaggccggcagcaagacaattacaatcactgtaaatgcaaagccacagccaaatcagacaccatctgtgacaataggttgcggtaataaaactgtaacagagggagatgcaccattttctctgggagcaagtgcttcaaacggagcagggctttcttacaagtcaagtgatccatcgattgcatcggtggatgctgccggaaatgtgactatccacagggctggtagcgtacagattacagctatagcaggtgaaatggcaggctggaatagcgcaagcagttcaataaccgtaacagtaaatccaaaaccacagccacagccggtggcaccgactgaaccatcagaacagccacagcagaactagaacagcaacaatagaacaggaacaaataaaatatagcaaatgaaaatacaataaagaaaagtgccggaaacggcacttttctattatatggcataattatttacaaaatatgacatattcttaatactttttttgtgacttctaaaaatagacaaaagaaatgaagtgtagtaatatagcataggattaaaccgaaaaataatgttacaatatgtaaagggtaggaaaatggaaaacaacgaaccaataagagatcaggaaattgaaatcgatttagtagcgctgtttcacgaattagtgaagcactggaaggcacttgtggcatcaatggtgcttcttgcagcagtatttggattatactccaagattacttttgtaccggagtatgaggcatctgcagagatgtatgtactgagcaagtcaacatctatcaccagtcttgctgatattcaggtaggctcgagtttgacaaacgactatgagtacgttatcacaggcaggacagttttatcacaggtaattgacaatctggatatggacgagacatacgagcagcttagcaggagggtttcaatagagaatccgacagatacacgtgtgctcaagattgtggttacagacactgatttagaagcttcaaaaacagtggcagatgagattgcaaaagtttcatcacagtatatcgctgacaatatggatcagtcacagccaaagattatccagacagcatatgcttcaaagacaccggtgaataataatatccttaagaatacagttatcggtgctgtactcggactgtttcttgctgccggcatagttgtacttggatacatgcttgacgatacaatttccaatgcagatgatatggaggccagaacaggcctcaaggtgcttgcatcacttcctgttgatgaggcagagtatgatggagcaaagtcaaagagaagaaaaaacaaaaaaaaacagtcatctaaatcagacgatagcaagagtaagaagagggcaatttaatggaaacagtagttattaatcagataaaagaccagagctatacaatgaaggagtctcttcgagctcttaaaacaagcatcagtttcagtggaaagggtgtgaagtccatcctctttaccagcagcttgcctaatgagggaaagacaaccgtagttatggatctggctcgttcgatggcggactctaagaagtcagtccttgtagtagataccgatatgcgtaagtcagtccttgtaggacgaatcagagcgaagctggagagcggtggaaagatatacggactctcacattatctctcaggtcaggtatctttggacaaagtgatatatgcgacaaacatcaagggtgtgttcattctttttgcaggacatgaggtaccaaatcctacggagcttcttgagacagaggggtttaaagagcttatcgagtttggagagaagaactttgactatgtgcttgtcgatactcctcctacaggagctgcgattgatgcggccgtagttggtaagaatgtagacggagcagtaatagttgctgcccagaatgctacaagcagccgtgcaatcatcaatacaaagcgtacacttgaggactcaggcgtcaagattcttggagctgtgctcaataagtgcaggtttgaggagtctaagtatggtcattactatggaaactattatggtaattattatggcaattattatggcagggacgatgacgaaaattagcaggcacagacatatatgaatgacggagaatagtgcagatgaaaaaaaagaaaaatataattattacggcagtaatgattgtacttattgctattatagcgataatacttgtaaagattaacagcagtaatgttaagaataaagaagccaaagacataaagccgggtacagaggcagttaagacaaaagccgatactcagactgaggatgacaacattacagacaaatcaggcatagaggaatttgcactatttggtgttgacagccgctcagatcagcttgataaaggaacacgttccgattccattatgattgtcagggttgatcatgatgctaagaaaatccgcatggtatctattttcagagactgtatgatgaatattgatggtcatggataccagaaggtgacacatgcacatgcgtttggcggaccggagcttgcagtagatacacttaacaaaaatctggacttagacataaagaattatgttacagtcaatttcaatacagtcggtgaaattatagatgaggtaggaggcattgtacaggatattgatgcatctgaggcaaaggtgataaacggatatattgatgaggtcaataagattcgtggaacaagctcatcccatattgattcagccggcacatatacactggatggaactcaggcagttgcgtattccagaatacgttatacagctggaggagactataagcgtgctgaaagacagagaacagtgctgttcaaggtttttgaatcagctaagcagatgaatacagcggcaaagattaagatggtatcagacctgattggacatgtcaacactaactataatactgatgagattctttcagtatttaaaaatcttgcagactatacagtagaggattcgacggcgtatccacaggtgttctatggtggaaaggtcgatggtgcatgggttgaggtgccgactacacttgcagacatggctacaggagtgcatcagttccttgaaggtgatacaggctatactcctagtgcaactgtaaacgaatacagcagtgcattatcaggaaaagtaagcggacctaataacgatttaacaaacacaaattttggggattaaatatgaacttcagacaaaatggagataagtacctcatcacaatagaagtaattgcactgatagttgtgctggtatttggagcagtgcattttgtgatgccggggaataagtcgaataagaaaataacagaaagccagcaggagacacagaatcctactcaggagacggatggaactaagcaggtacaagttgatggacagcagacagcaccggcatttactccgtcagattctgtcaagacgaagctgtcttctatgacaacagaggaaaaggtagctcagctattcattacgagacctgaggagattacaggtgtatcagagttcactcaggccggtaacaagacaaaggcagctattggtacatatcctcttggtggttttgttttcagacaggaaaatttttcaggagaggctgcagttacaaagatgatgagcagtctgcagtcattttcgcaggagcgactgggcgtgaatctgtttcttgcaattgatgaagaaggtggagaaagacttcctcttgcttcagctaatggatatgaggcacagcaggcaccatcacagcttggagatgctgacgcagcgggcagcagtgcaggaaagataggctcatatatggctaccaatggtcttaatatgaattttgggccgacagcggatatagcatatggtgataatgcagataacgatacatatgcatttggcagcgagtcagcgactgtaggtgactgtgttgcagcacaggtaagcagctataatagtgcaggaatcaattctgtagcaaagagctttcccggaaaaggaaaggctactacagattcagcgacaggaatgctctggatgacagataagctggaagatcttgaggcatctgattttgtgccatatcagaaggcaattgaagcaggtgttccggcagtcatgatgggaaatgtgatttgccagagtgtgacaggagaggaaaccacgccatgctctacatcagcaggtgccgtaaactatatgagaactaccatgggctttaatggccttttgattacagatgatttatcagatgcatctcttaataaggtatgtacacaggatgaggcggctgtggcagctgttaaggcaggaatgagcatgctttatgtttcaacaggctttgagagcagctataatgcagtgctgtctgcagttaacagtggtgagataccggcagaaaaattagatgatgcagttggaagaattctaacaacaaaaggaatttaatatatgcaaataaaagtaaatccgttatactatagagtatagcggatttttgttatatattttgtatatttaaaggagaattgttgatatgtcaaattgtttcaatccggcaaatattcttttgccaaacgatggtatagatatggaaaaatggtcagttatcgcctgtgaccagttcacaagtcaggctgattattgggatgctgtggaaaagtatgtgggcgatgctccgtcaacacttaatgtggtattccctgaaatatatctgggaacaattgcgaaacaggagaatgattgcaattcgtcaggggaaggtgtcaaaaatgacaaagaaaccggcagaaaaacaaaatatgcttcaatgactgatgatgagagaatcaaatatattaataccactatggatacatatctcacagatggaaccctaaagcaagcggtggcagatggctatgtgcttgttgagcgtactacggagtcaggggtgcgtcttggaatagtaggacttattgatctggatgactatgatttcgacccgaaaaagaagactctcatcagagcaacagagggaacagtaatctcacgtatacctccgagagtgaaaataagagagaatgcagctattgagctgccacatgttatgctgcttgttgatgatcctatagacagacaaaagattgatggttgccagggtgcttcacaggaagatgcagtaaatatagcagctgtaaagcatggaataatcgagtatgtgtatgccatcagggacactcttcgtaagctttacgatacagagctcatgcagggaggcggacatatccgcggctatgctgtcgagggtgaggcagcaaggcaggtgacagaggcatttgcagcaaaacagaatagctgtggaggctttttatttgcagtaggtgatggaaaccattcccttgcaacagcgaagacatgctgggaaaatatcaaaaaatccggaaaattcacagaggagcagttgaaaactcatcctgcaaggcatgctcttgtggaaatctgtaatctgcacagtgaggcgcttgagtttaagcctattcacagactgcttacaaatgttgatgtaaaggatatgctgtcgtttttcgaagctgaaatcacaaaacaaggacttgagagcgctgagggtgatgagatagtatttgagtatgttgaatcaggcgctacctcaataaagaattccggaattaatatcacaaatagaggtgaccgcctcccggttgagatactccagggtattttagataagtatcttgagacacatgacaatgtggaaatagactatatccatggtgatgaagcacttcacggactggttaaggagactaagggatgtggaatctttcttcagtcgatagacaagagcacattgttccctgcaatcaatgcgggcggggtgctgcctagaaagacattctcaatcggagaagcgaatgagaagagatattatatggagtgtcataagatatctatgtagctttgatttatatacatatgttaattttatcatatttagggaaaatcttcttttagtattataattatttaacaaataatgttattttactacacaaagatatttattaagtgtataataatacaaaaataaatttcacaaggggaaaataatgggaaaatactttggaacagacggcttccgaggagaagctaatgtcaatttaacagcagagcacgcatatcagattggtagatttttaggctggtattatggagagcttaagaagcagaagcagctcgacgagccggcaaagatagttataggaaaggatacaagacgttcaagctacatgtttgagtattcacttgtatcaggacttacagcatcgggagcagatgcatatctattacatgttactacaactccatcagtggcatatgtagccagaaccgatgattttgactgtggtatcatgatttcagcaagccacaatccatactatgacaatggaatcaagcttatcaacagcaatggagagaagatggatgaggagacaattctccttgtcgaggactatatagacggcaagctgcgcctgtttggtcaggagtggaaggaattgccttatgcacataaggatgctatcggatgtacagttgactatgtagcaggccgtaaccgttacatgggatacctcatatcgcttggtgtctactcattcaagggcatgaaggtaggtcttgactgtgccaacggaagctcatggaacatggcaaagtctatttttgaggcacttggagcaaagtgctatgtcatcaacaatgagccaaacggtctaaacatcaacaataatgcaggctctacacatatcgagggcttacagaagtacgtggtggacaatggtcttgatgtaggcttcgcatacgatggagatgcagacagatgtctctgtgtagacgaactgggcaatgtaatcacaggagaccatatcctctacatatatggaaagtacatgaaagagagaggaaagcttgataacaatactgttgtcacaactgttatgtcaaactttggactctataaggcccttgatgagcttggaatcggctacgcaaagactgcagtaggtgataaatatgtatacgagtacatgcagcagaacggctgccgcatcggcggagagcagtcaggacatatcatcttctctaagtatgcatcaacaggtgatggtatccttaccagccttaagatgatggaggtcatgatggcgagaaaacagaagatgagccagctctgtgaggggcttagtatctacccacaggtacttcagaatgtgcgtgtggctgacaaggccgaggcacttgcaaatcctgaggttcaggcggctgtcgaccaggttactgcagagcttggcgatacaggacgtatacttgtgcgtgagtcgggtacagagcctgttatccgtgtcatggttgaggcagagagcgaggaaatctgtcagaaatatgtggatatggttgttgcaaaattaaaataaaggttaatgccaaagataatacacgtaatatacaaaagctgtgtgagaatatcatgcagcttttgctgttatcagggttcataaatgagtgaattaagataaattaagtggatataatttaatctgtagagagaatagtaattaaattctgccggaggaaatagtctatgcctgaaatcttaattatttttatattatgtgccggtattattgtaattggcataatattgtgtataattattaaagtgagtcatatgtctgatgacgaacagaaaaaggacgatgaacgacagctggagttcattcgtgcctacaaggagcataaaaaaggacattgagtttaaaggattatataataagagacatacaggaaaagttcaaatatcttccgtcagcggtatatttggctttaatctgcattgcgatgtatatttttgtgtgtctgctgcgatatcttttcacaatgagagaggtatcacaggcagatgagagaagaaaaaagatagtgggcaaaatctggcatatgctgttctgcggcacatttgtggcctatatgtatacgcttataatgatagtgtattattcaagggagccgggaagcagaaccggcgtcgccgatatggtgctgtggagcacatggggcatgacacttcagatgcacgcttattttatagaaaatatagtattgtttataccatttgggcttttgtttccactggtttttaaaaattggatgagatggtttacaatacctgttggtgcttttataagcgcagcaattgagtacacgcagctggttaccggcaggggatattgtcagcttgatgattttgtgacaaatacggcaggatcagcaatcggattttttatttatttgatattatatgcagggtggcttatatggaaaaaaataagataagcattgtggtgccatgctttaacgagaaagaggctctgcctcttttttataataaaataacctgggtactgaatcagatgagtcaagcgagtgaggcagagggattgtcctatgaactgattatagtggatgacggctctatggacgggacgctcgatgttgcaaaggagcttgccacaaatgattccggtgtaaaatacatatccttttcacgcaattttggcaaggaggcagccatgtatgcgggcttgcagcatgcggtgggtgaatatgtggcaataatggatgcagaccttcaggatcccccggaaatgcttccgaagatgtatcaggtccttacaaaagagggctatgatgctgtcggtacaaggcgagtgacacgcaaaggtgaaccagcgattagatccttttttgccagaaagttctataggctgatgagtaagatttcaaaggcaaatatggttgatggggcacgtgactacaggctgatgaacaggaaatatgtggatgctcttttatcgctaaaagagtacaataggttttcaaaaggattatttggctgggtaggattcaaggtcaaatggcttgagtttgaaaatgtaaaccgcgtggctggcgagacaaagtggtcattttggcagctgtttctctatagtttagatggaatagtagcattttcaaatgctccgctatacatggcttcaatagcaggagtgttcagctttattgtggcgatagcagctatgctttttatcataataagaagacttgtatttggtgatccggtagcaggctgggcatcaacggtggtcatcattctttttatcggtggtatacagcttcttagcatagggatacttggactgtatctgtcaaagctttatctcgaggcaaaggacagaccgatatatttaataggagaatcaaatatagaaaaacctacagaaaaaaattaaggctttcttaagaattattaattcgatagcacatgacatttttttcggatgttatgtgctataattttttcggcaacgtttattaatgcatgaaagaggactaagatgaaaaacgtactggagtggcttgaggccacagtagaaaaataccctgacaagcctgcattttcggatactgaatgcagcattacgtttgcgcaggtgtatgatatagcaagaaatacaggagcatatctgatagaacagcttggagtggacagaacccctgttgcagtatttgccggaaggaaaatggtgacaccggcatactttctgggagtggtatatgcaggcagaccgtatgcgccgattgatgcatcgcttcctgacaagagaattgaaaaaatacttgaaaatctgtgtccaagggctattgtggcagacagggaaagccttgagcatgtggagagcatagtggatgagctggcaaagtcagaaggcttcgatagaccgcagatatttattgctgaggatatatcgcgcttcgatcaggtggcgggcgctgatagtaattgtaaaatcagtgaatcagcaggagacgctgtgacggatagtgagaacgatacagatggtggtgttgtggcaggctgtgcaggaaaaaaagatgacagctcactggagaagcttgcaacagtccgcaggcagatgtccatgacagacccgctgtatattatctacacgtcaggctccaccggcaatccaaagggagtcatgacatcgcatctgtcacttatgacatacatcaatgcatattgtgatgtgatgcatattgaatgcgacgatgtgctgggcaatcagtcaccgcttgactatattgcggcaatcagggacatttatctgccgctaaagaccggctgcagcacagcgattattccaaaagagtattttatggagccaaatgtcctgtttgattacatgaatgataagaaggtcagcagtgtcggctggagtgtttcggcatttaccatcctcacatcgcttggagcatttgaggaagtagggcttaagagtcttagaaaaatctgcttctcaggctcagtgatgccgtgcagggtgcttaggaaatggcaggaaaatctaccggaagcacattttgtgaaccagtatgggccgacagaggccacagcatcatgcacatactatagcgtggatcatacagtggaagaggacgaggtgcttcctataggaaaagcctatgacaattacagggttttcctgatagatgagcatggaaatgagccggctgtcggagaacagggcgagatatgcgtatgtggaccaatcctggcgctgggttattataatgatccggagaggacagctgcggcatttacactcaatccacttaacaaggcttatcctgagcgtatgtaccgcacaggggattacggaaggctcgatgaggatggcatacttcatttctgtggacgtatggaccgccagataaagcacatgggacaccgtgtggagcttgatgaggtggagcatgccgccaatgtggtcgagggagtcgcagaaagctgcgttatatataataaagcaaaagaggtgctgatacttttctacacaggtgactgtgacaggagaagccttgcgctggcactgagggacgagctcccgggctttatggtgccaaggaaaatcaagaagttggagcagcttcctaagcttccaaacggaaaatatgatatgaaaaaactggaggaaatgtaaaatgagagacacaattttagagattttagaggaattaagaccggatgtggattttgagaaggagacaaagctcatcgatgacaaaattcttgagtcatttgatatagtttcactcgtgtcggagttgactgatgagtttgacatcacaatcagaccaaaggatctggttcctgagaatttcaactcagtagatgcaatcgagaagcttgttaaagagcttgtggaggaataaagcatatgagacagacaccgtactatgtatttgatacggatgagtttgcaaaaagagcagccatgataagggctgctcttgattgtaaaggaggacgtaggataccgctttgcttttcgataaaggcaaatccgtttctgcttcacaggctgccggagggcttagatcatgtggaggtgtgcagcccaggagagcttgagatatgtatagcactgggcgtgaagccggagagcatcatctattcaggtgtgatgaaggaaaaatgcgatatagagcgagcagtttcatatggcgccggtatactcacctgtgagagcataagacatgcagcgctgatatcagaagtgatgcttgaacgtatgccggaaggtgcgcatgaagctggattggtcgaaaagaaggcacaggtcatactgcgcctgacaagcggcaaccagtttggcatgtcgcttgaggatattgaatatatcatttcgcatccggatgagtttaagggcatcatggtaataggcatccactattattccggcacacagaagagcttgcgcaaaataaataaggacttgcaaaaaataaagtctgcacttaccggattaaaagaaaaatacggttttgagccacagcttgtagagtatggcccgggactttgtgtggagtattttgaggaagactggcaggaaagggaaaaacaagcacttgatgaggcagctgaggtgcttagagaatttgctgtggaatatccgcttggcattgagatgggacgtttccttgcagcctcatgcggtaaatattacacacaggtaaaggaccttaaatcgacaggcgatgccaattatgcgattcttgatggaggaatccaccatctgaattactttggacagagaatggctatgcaggtgccgccgattagtatatatagagctgccggtgtggaattcacagaactgccggacacagactatacactctgcggaagcctctgtacagtggcagatgtgctggtacgcgaggtgaagcttaagaagcttgaacttggtgatgttcttgagttcgggcactgtggcgcatactctgtgacagaagcaccggcgctatttctttcaagacagcttccggctatatatgcatattcgaaggaatatggatatgagtgcctgagggagcatattcctgcggctgagataaatctggccggaaaaaaattgtaaataaaagcgccatggtaaattgccatggcgcttttgaatatgacatgaacaaagcattttgtgggaagcctgactattagccaagctccttctcacacatatcaagtacagaagcaatggtagtatccatatcgtagtacttgtactcgccgagacgaccaccgaatataacaccggtctccttatcggcaagctccttatacctggcgtagagctgtccgtttttctcatcgtttacagggtagtaaggctcatcgcctgccttccactcagaagagtactcacggctgataatagtctttggcagatcatttccatcctcatccttaccgaactcgaaccacttgtgctcgatgatacgtgtccatggagtctcgcggtctgtatagttgacagcggcatttccctggaagttaggaatatcgagggtctcattctcaaagcgcactgagcggtactccaaagtacctagcttaaagccaaagtatgcgtcaatcggacctgtgtatacaaccttgtcagcaagagcatcaagctcagccttgtgctcaaggtagtcggtatttagtctgacctcaatgccgtcgagcagattctcaaccatcttggtgtatccaccgattggaataccctgataaagagcattgaagtaattgttgtcaaaggtaagtctaacaggaagacgctttatgatgaaagccggaagctccttacaatcacgaccccactgcttctcagtgtagcccttcacgagcttctcatagatatcacgtccaacgagcgagatagcctgctcctcgagattttttggctcgccggtgatttcctttttctgctcctcaatctttgcagcagcctcctccggtgtcaccacaccccacatcttgttgaaggtgtacatattgaaaggcattgagtacagctcacctttgtagtttgctacagggctgtttgtgaagcggttgaactcagcaaactgtgtgatgtagttccagaccctcttgtcattggtgtggaatatgtgggctccgtacatgtgtacattgatgccctcctgcttttcggtgtagacatttcctgctatgttaggacgcttgtccacaacaagcactgatttgcccttggcctttgcctcatgggcgaagatggctccgtagagaccggaacctactactatataatcgtatttcattgttttctccttgttgcatagtgatattataattataagtacattttccggaaaaacaagcagaaacaatgaaaataagtaaatattaataaatcctgtattagaaaattatgatatacttagatataggaagttcaaaagtaagaaaataagaggaaaggcaacgcaacgatgaaactacccggctactactcctcaggagaatttgcaaaaaaagcgcatattacaaaaaagaccatcaggtactatgacgagcacaatattttaaaaccatcctacgtaaacgaaaacggagccagattctataatgatgacgactttgcgcgtctacagcagatactgttcctcaaatatctgggattttccctggatgatatcaaggagatgacactcagaaacacggacagcaatgtcatgtctgagtcgcttcacatgcagcttggtctcgtggaggagaggatagagcagatgaagcttatgaaatcagcactgcaggaggcttcagaggtgatagacgaggggcgaagtgtggactggagtcatatgctggagctggttaatataaacgagatggagcaaaagctaaagcagcagtacagggatgcttcgaatatatcagccagaatcaatctgcacagggatttctcgatgaatccggtgagctggtttagctgggtatttgatgagtgcagcttttttgagggggaaaaggtgcttgaggtgggctgtggtgatgcctctctctggacacagaacatagacaggataccggcagatatgcagataaccctgactgatatatcgtatggcatggtaagggatgcgacgagaaatgtaggtgcagacgacaagcgcttcacatatgaggtgatggatgcccacaggctgtataagccggatgcatcgtatgactgcgtgatagcagaccatgtactgttctattgtgacaatctggatgccgtgtgcagtgaaatccaaagggtgctaaagcccggtggcgtgtttgtgtgcagtacatacagctcacggcatatgaaggaaataaacgacctggtacaggagtttgatgaccgcatagagctgtcagcggaaaggctgtatgagcaattcggtaaagaaaatggtgaggcaatacttggaaaatactttggtgatgtaagctggcatgggtacgaggatgagcttgtggtagaaaaagcagagcctgtgatagagtatgtgctttcgtgccacggcaaccagaacaggtatattgtggaccgctataaggaatttgcggcatttgtcagaacgaagacagagggagggttccatatcacaaaggatgcaggtgtatttattgcacgaaaatgatttaaaaacaggatattataagcatatattttgtgaaaaatgctaaaaatataaaaaagtacttgaaggtgcccttggggcaccttttataatgcaggtaaatgatgaatcaggtcagtggattctacagaccgaaagcatcaaatgcagcacgtagtttcagtttgaaggagaacaacatgaaaggtattatattagcgggaggttcaggcacacgtctttacccactcacaatggtaacatcaaagcagttacttccaatttatgacaagccaatgatctactatcctatgtcagtgcttatgaatgccggcatcagagatatcctgatcatttcaacaccacaggatacaccaagatttaaggagctcttaggagacggacatcagtttggtgtcaacctcacctacgaggtacagccaagcccggacggacttgcacaggcattcgttatcggtgagaaattcatcggggatgacacagtagccatggttctcggagacaacatcttcgcaggacacggactcaacaagagactcaaggccgcagttgaaaatgccaagagcggtaagggcgccacagtattcggctactatgtagatgaccctgagagattcggtattgtagagtttgataaggaaggaaaggctatttcaatcgaggaaaaacctgagcatccaaagagcaattactgtgtcacaggtctttacttctacgataacaatgtagtagagtatgcaaagaaccttaagccatcagccagaggagagcttgagataacagacttaaacagaatctatcttgagaaaaaagccctcaatgtagagcttttgggacagggcttcacatggcttgacacaggaacacatgagagccttgtagatgctacaaactttgtcaagacagttgagacacatcagcaccgtaagatagcatgtcttgaggaaatcgcttacttaaacggctggattacaaaggatgaagtattaaagacatatgagctagtaaagaagaatcagtacggacagtacttaaaggacgtacttgatggaaaataccgcgagcagttatattaaggaggaaatcaaaatgacaattatcgtaacaggtggagcaggatttatcggaagcaacttcgtatttcacatgcttaacaaatatccggattaccgtatcgtatgcttagactgtctcacatatgcaggaaatctctcaacacttgagcctgtaatggacaatccaaacttccgtttcgtaaaggagagcatcacagaccgtgacgctgtatacaaattatttgaggaagagcatcctgatatggttgtaaacttcgcagcagagtcacacgttgaccgttcaatcgagaacccacaggtattccttgatacaaatatcatcggaacatcagtgcttatggacgcatgccgcaagtatggtattaaaagatatcaccaggtatcaacagatgaggtatacggagatctgccacttgaccgccctgaccttttcttccatgaggatacaccaatccatacatcaagcccatattcatcatcaaaggcagcagcagacttactcgtgcttgcttaccaccgcacatatggacttcctgtaacaatcagccgttgctcaaacaactacggaccataccatttcccggagaagcttatcccacttatgattgcaaatgcgcttaatgacaagccactcccggtatacggaacaggcgagaacgtacgtgactggctctatgtagaggatcactgcaaggcaatcgaccttatcatccacaacggacgtgtaggagaggtttacaatgtaggtggccacaatgagaagacaaaccttgaaatcgtaaaaattatctgcaaggagctcaacaagcctgagagccttatcacattcgtaggagatcgtaagggccatgatatgcgttacgcaatcgacccaacaaagattcacaacgagctcggatggcttccggagaccaagtttgaggacggaatcaagaagacaatcaaatggtaccttgataaccgtgagtggtgggagacaatcatcagcggagagtaccagaactattacgagaagatgtacgcgaatagataactgctattcgtaaaccttgaagaatcgaaatgcgtgttgtaagctcgcttacataagcgcattttgattctttgaggctctagaatagagcaggaacaacgtatataagcaatcttagctgcgtaagcagcgggaaagcatgcctaaagcatgcgggattgcgcatatatgttgggcctgtttacgaatatttgtataaaggagacccaaaatgaaagtatttgttacaggagttgcaggtcagctcggacacgacgtaatgaacgacctggcagcacgcggttacgaaggaatcggaacagatatagcaccacagtatagcggagcagacgatggcacagcagttacaactttgccatatgtctcactcgatatcacagaccgtgatgcagtggaaaaaacaatcacagagcttaagcctgacgtagtagtacactgtgcagcatggacagctgtggatctggccgaggatgatgataaaaaagcaaaggtgcatgcaatcaacgcagacggcacacagaatattgcagatgcctgcaagaagatagatgccaagatggtatatatcagcacagattatgtatttgacggacagggcaccacaccatggcagcctgactgcaaggactatgcaccactcaatgtatatggacagacaaagcttgacggagagcttgcagtggcaaatacacttgagaagtactttatagtgcgtatagcatgggtatttggtgtaaacggcaagaacttcatcaagacaatgctaaatgtcggcaagacacacgataagcttacagtagtaagtgaccagattggtacaccgacatatacactcgacctttcaagattgctcgtagatatgatagagactgataaatacggttactatcacgctacaaacgagggtggatatataagctggtatgattttacaaaggaaatctttaagcaggcagtggagcttggtcatacagagtattctgaggacagacttacagtagcacctgttacaacagcagagtacggtgtgtcaaaggcagcacgtccgtttaacagcagactggacaagagcaagctcgtggagaatggatttaagccactccctacatggcaggatgcgctgcacagatatctgcaggagatagaattttagtgagcaaagaagctacgaagtagcgaggttgagttagatgttgggatgttcacgtaatacaagaaaggacatagaaatcatgggacagattaaagtacagaaaaacgtaggtggaatcgaaggactttgcatcatcgagcctacagtgcatggagacaaccgtggatactttatggagacatacaattcaaaggatatgcaggaagctggcattgacagagtgttcgtacaggataatcagtcatgctccacaaagggagtgctccgcggactccatttccagaaggaatacccacaggcaaagcttgtgcgtgcagtaaaaggctcagtatttgatgtggctgtagacttaagaagcgattcaaagacatacggcaagtggttcggagtagagctcacagaggagaacaagaagcagttccttattccggagggctttgcacacggatttttagtactctcagatgtagcagagttctgctacaaggtaacagatttctggcaccttggagatgagagcggccttgcatggaatgatcctgcaatcggcatcgagtggccacagcttgtcggagagtatccgggaagcgctgacggaagcggatacacacttgaggatggcacaccaatcaacttgagtgataaggatcagaagtgggagacactggaaaacacatttaaattttaaaaaaaattattaattttgttataatcattgttaaaatattgaaaaatcaaaatcatttgttaaaatagataagtactatgtatttatagatagaaggagaaacaaatgaagaaaaagaaaaaggctacaaaatggataatatttgcaagggtattattggttttacagcttattgctagtgctatgatatttgctatggctgtaaaaacaaaaatgttacctgcaaagtatatcatgtttgcagccgggggtttattaattatggagttcctggtgtttgcacttgttcacttaggacaaaacataatgaaaccaaaagcgtcgggctattttaagcgaggattgggaacatttatatctatactggttatcatatgtagcttatatggcacgtctgtgcttagcaaggtgatgggcacacttaatgatatgaccggaaataaaaatgtcatggaggataagattgttgtctatgttatgaaggatgatcccgctgagactattgatgatgccaaggattatacctttgcatatactgattcatatggatatgaagagacaaaggaaacaatagatgatattaataaaaaaacagacagtacaatcaatacaaagccatatgcgtctgcaatagagatggtggatgccctttattcgggtgaggtaaaggcgatgatactcaatacctcatatgtatctgttatcacagatacagaggggtatgaagattttgaaacaaagacaaaggtattgtatgcttatactaagacatatgaggttgagaagacagaaaaggatgttcaggtgacaaaggagccgttcgttgtatatatcagtggatcagataccagaagcaagaagcttgcaaagagccgaagcgatgtaaatattctggcttttgtcaatcctgagagtagacaggtgttattgttaaatacacctagagattactatgttgaaacgtcggtatctcatgggacaaaggataaactgacacattgtggattgtatggtatagattgttcaatgaagacattggcttcagtatatgatctggatacaatcaactactatgctcagattaatttcacaggttttgagactcttatagaccaaataggtggagttactgtgaattctgaacaggcatttagttcatctatggattcttacaagttttcaaagggtccaaatgaattaaacggagaggaagcattggcatatgcccgtgagaggcataatcttccggacggagataatggcaggggacgccatcagatggatcttatttcagcagtaatagataagatgacaaacagtacggcattattgaccaactactccggtattcttgacagtcttgagggaatgatttccatggattttaaaagctcagatatttcatctcttatcaatatgcagctgtcagagggaggaagctggaatattaagtcatttgcagtaactggtcagggtaccaagaaaacaacatattctatgcctattcagaaagtttatgttactattccggatgagagcagcgtagagcatgctaaacagttgatacagaaggttatgaatggtgaaacaattacagatgatgacctgaagtaattaaataggtcgattttaaaggctacagttgagcggagacgcataaactgtagcttttattaaatttttgttataattttttgaaatgtggcaattatatatcaaatatggtaaaatatcatttatggacaaaaataaatcgatttcaacacagaaaattaacagatgggatgtaggatactttatattatatggtattgtgctggcaaaatgtgtatacgagactactatgttctcgcagcaggtgctggtaggaacctttaagctttttcttgcagcgatggttttgtatacaggagccaaggtccttttttccggatattacagcagaaaagagcagcttgcaattgccgtagttgttcttatatttggaatagtaggcttacaaaccggttattatgaactgctgcagccggtactacttattgccggggcaaaaaatgtgaggtttgacaatatactaaaggtatatacggcggtggtatcggtcatgcttatagtggcagctatagctagtcagacaggtgtgatagcggatgtgataggctattcaccgagaaatgcagcggcggccagacattcatacggcattatatatccgacggactttgcggcacatgtattttacctgatattggcggtaagctgccttggtatatggcagagggtttgggaaaacgaaaaatacagatatccggcagggctcagatggctaatcgtaattgtggcaggtgtatttatatatataaaagcaggagcctttacgggaacagtgtgcctgacaggattcctggttctgacaggcctgatttatctgcttgagaggaaaaatctggcacgcagggtgtgtgagatatttaaatatttgccgatagtgtgggcgggtctgtttttggcgctgagctatttttatagcgcgagcaatgctgtaatggttaaaatagacactgtactatctcaaaggctgatggtgagccacaaagtgtggagtgagtatagcatcaaggcatttggacagtttatagaggaacagggctggggaggcattgcagacccgaccgggatagaccctgcaaagtatttctttatagatgatatgtatcttagaatgctgtttgagtatggaataatagtatttgctgtagtgcttatattattaatagttataggtcatagggcaataggggcaaagcaatatgtgctttttgcagcaatagtcatgattggagtgcactccttcatggagcatcatctgctcgaggtggcatatgatccgttcctgcttgtactgcttgccggtatagatactgctgatgaggaaaaatccgggagaaagatatgaactcaaaaaaatggataatccagtacctcgaggtacttcttgatataattgtgatgtttacatcttatctgattgcaaactggtacaagttcggtttctttagaacgggacttataaaccatacagagcactatcttacactatttctggtggagctggtggcatatgtggtggtacattttgtggcatttgcagatgataatctgataaaccgaaagctctttcctgaaatatacaatgtcctgaagatgtatgtatatgtgggcgcaatcaccgtcggctgcgtatattttacaaaaacaagtgaatatttctccagagggcagatgggtatgacctttatactgagtactatattcactgtgatagtcagacagctgctgaaaagactggtgacaaaggaatatcaccgctcgggggccaatgagaaaatcatgcttgtcaccacatcagaccaggtggagcgagtgataaaaaagataaagactacaagaaactgggattttcgtatatcaaacatagcgatactggactgtgatatggtcggtgagatagtggacaagatagaggtcgtggcaaccgccgataatctgcttcaggtgatatcaacagcagagatagactcagtgtttgtgcatctgccggacaactatccgtttaagcagagagagtttgttacagtactcaatgagatgggtaagacagtgcacctgaatgtcaacgagtatgaggccaaggtcggtgagcactatatggatttccttggaaaatacgcagtggtcacatggaagaataagacataccgtgtaaggcatctgcttattaaaaagctgatagatctgctgtttggcgtggcaggaagcatacttatagtgcctgtgtggtttgtagcatttatgggcaaaatagtcacaggcgaccatggaccggtgctcatatcgcttgtcagagtcggcaaaaacggacgaagattttattattataaattccgcaccatgtatatggatgcgagggatagatatgataaatggctactggatggaaagaaggggaaagatccgagatttacaccggttggaagaatgcttagggcattaagacttgaaaatctgccgtcagcctggaatgtgctgtggggagacatgagcatggtgggaaatccggctccatcactgccggagtttatagaatactctgcatttcacagaaaaagtctatctgtaaagcctggaatcataggcttctggcaggtatacagcagggaacacaggctgcttaccgaggaggagcaaagcgagtacgatcaggaatatatactgaactggactgtaggtcttgatctgaggattattttcagggcagtatgtcctctgtgcaggtcagtgtcaaagcgagagcttgtcatgccggcacagctggttgatgagatgagatgcttgagcgagctggtgaaggatagaatgcctttaagctatgacatgcaggcatatcagacagctgaagatagcggaaagccggtatacagatttataaagcgtctggtggatattgttgcctcactgcttggacttatagtactgtcaccggtgtttatcatactcgctgtgataatcagaatgagtgatggaggcagcgtgttctatgggcacacaagagtcggctataagggaaagaaaatatctgtatacaagttcaggagcatgaagacgaacgcaggtgatctggaaaagatactgacacctgaacagcttgagcagtatgtaaaggaattcaagatagacaatgatcctcgaatcacaaaaataggaggcttcctgcgaaagaccagccttgatgagctgccgcagctaatcaatatacttaagggcgagctctccatagtgggaccgcgtccaatcgtggagaaggaaaccgagatatacggtaaggacatcgcaaagcttctgagcgtaaagccgggactgacaggctactggcaggcatatgccagaaacaatgccacctatgagagcggagagcgccagaggatggagatgtactatgtggagcactgctcgctttggatggatataaagatacttttcagaaccgttttctctgtaatcagggaggatggagcacaataatcagaacatatgtgagaaatatgatgaagaaattggatttaaatagtataacaataagtctcataatacctactctcaacgctgcagagtatatgccaggtctgatagatatactgggcaggcagacacgtaagactgatgagataatagtgatagactcagaatccgaggatgccacagtgcgcatggcagagcaggcaggctttaggacactaaaggtcaagagaagcgaatttgatcatggtggcacgagaaactatgctgtagccatgtcaaagggtgatatagtgatgtttttgtcgcaggatgcactgccttcagatgaacactatgtggaaaatatgttggcaggctttgaaaacgaagaagttgttatgatatcagccagacagctcccgagaagggatgctaagccggatgaagcattagtcagggagtttaattatccggcagaaggctttgtcagaagcaaagaggatataccacgacttggaataaaggcatatttcttctcggatgtatgctcagcctacagacgtgatttctttgaagacataggaggctttgaaagcccactgctcacaaatgaggatatgctgatggcagccagggcacttagggcaggatacaagataggctattgtgccacagcacaggtgtatcactcacacaactatacatttaagcagcagtacaagcgcaactttgatgtagcagtctttatggagacctataaggatgagataaagtgtgacggtaccacaggtgagggtatcaggatggtacttttcatagaaaaaaagctcctaaagcagttcaagattggggcagcagtgcactgcatatttgacagtgcggcaaagtttctgggcaacagggccggaagaaagtggaagaggaagaatgcatagcacagacaagatagccattctaatggctacatacaatggagagaaatatatatgtcagcagatagactctatcctgtcgcagacctgcaaggactgggagctatatatacacgatgatggctctacagacaacacgatagctgttgtagaaagctatgtggaaaaatatcctaataagatacatctgatagatggtaaatcaaccggcggcgcaaagtacaactttttctatatgtttggtcaggtggaggctccatactacatgacctgtgatcaggacgatgtgtggctggataaaaagatagaactgacatatgataagatgcttactattgagaacaaagcagatgttccgtgcctggtatacacggagcttcgtgtggtagatagcgagctgaatacaatagcggacacgatgagcggataccagagtcttgactgtcacaagcgtacaatcaaccagtttatattgcagaattctgtgacaggctgtacaatgatggtaaacagggccttaagagataagatgcttcgcatcaccgatatagacaacactataatgcatgactggtgggcagcacttgtagcagcacagtttggcaaaacagcattcatagatgagcccaccatactgtatagacagcatggagacaacagcctgggagcacttgggataaataagctctcatatattgtgcgccgtgtctggcagaaaaaacagatacaggagagcatgagactgggacggcttcaggcgagagaatttgcaaagacatataatctgcctgctgacagtctggcagtaaggtatgcggcactggaaggcaaatccagacgcgtgagacaacggttttataaggaaaatgatatgtataagaccgggactatgagacggctgggacaggctgtgtggggatgatttgacaaaagtatcagtagagagtataattcttaggcatttagtgacaaataatattttagattaggaaagaatttaattgttatggaagaaaaatttataaaaaaagtatttggaataacattgttggtttattttgcttctatatgtttagtatatttagtgtcaagtaagcagtttcactaccaggaaactcagagtgatactgtatcacagtctcaggttgtaggagagtttgctgagggagatacaattaagcagacatttacggttgatagccagtatcttgaaggggtgacagttacaccggcaacctatggcaaaaccgcagaggggatgcttgaagcgaagattacagatacaaacggaaaaaatattgctgatattgatgtggatatgtcagagctaagtgataatcagccatatgatataaaattgcctgaaaaaatcaaggtggataataatgaaagctacacattagaattgatttgcaaatcattggatggcgacagtcaaatctctttttactatggaaattctatcaagatggcaaaaggagagatatccaaatcatatgatgatagcactcgcgtgtatgtaaataacgagggtcttgagggggagttatgcctctctatagatggaatgaacacaatatggtttggtaactattattggataataatgggagcaataggaattcttcttattgtttattttgttgtatcattaaataaacggaaatcaggtaaacaaacagtagttattgcattcttagattctgtttcacattacaagttcctgataagccagttggtaaagagagattttaagactaaatataagcgttctgtgcttggtgtgtgttggagctttttgaatccactcttaatgatgcttgttcagtatgtggtattttctactatatttagttcaggagtggcgaattaccctgtatacctacttagtggaattgttatgttcaacttctttaatgaatgttgtgctatgggaatttcagctataacatcaaactcttcacttataacaaaggtatatgtacctaaatatatataccctctgtcaagggcaatgtcatcattagtaaaccttggattttcacttatccctttgctcatagtgacatttgttacaggattatggcctagaccggcatttatattattgccatttcctatcatatgcatgatgatatttagtctgggaatgagctatttccttagtacgtcaatggtgttttttaaggatacgcagtttatatggaatgtactgagcacagtgtggctctatgcgacacctattttctatacagaaaatattattacttcacctatattattaaaagcttttcattgtaatccaatgtatcagtttatatactttgtgagaagcattctcatagatggggtatcaccgtcaccacagcattatttatattgtattctgctatcagttgtaccatttatacttggtttctggttctttaaaaagaatgaggacaagtttattttcaatctgtaaacattaaggagtatgacctatgaacatgatagaagtaaaagatgtgtctatatgctttcgaatggcaaatgacaaattgaatagcctgaaagagttcatgatccagaaagtgaagggaaaacttaaatatgaggaattctgggcacttaaagatgtgagcttcaatgtgaaaaaaggtgaggttgtgggaatagtaggtcacaacggagccggaaaaagtacaatattgaaggtaatctcagggattatgaagcctacagagggaactgtcgtaacacatggtaatattgttccaatgctagagctcggaagtggctttgatatggatcttagtggcagagaaaatatatatcttaatggttcaatactgggatattcaaaagagttcctggatgaaaagtttgatgaaatccttgaattctctgagcttggagagtttatagagcagccaattagaaactattcctccggaatgcttatgagactggctttttcggtggcgactattgtgaatccggaaatactgattgtggatgaaatattagctgtaggagatgctgactttcaggaaaaaagtaagaataaaatgcttgatttgatgagtggcggaactacagtgctatttgtatcacatatgatatctcagatacgggagatgtgtgatacagttgtttggcttgatcatggcaaagtaaagatgattggtggggcaaaagaggtatgtgatgcatatcagtttaagaagagtgaaaacgatgaattgtcgaagctttactttgatgatggaacaggctttaatgagagagctacatttactcaggttatgccgatggatggtaatatctttaaacaggtatatgaattcccgacaaaatgccagcatgtgagatatgatccggtagagggtacaacgatatcgcttagtgacttgaagattgtagcagaagatgcaaatgtcaatattatagctacgaatggcagacaagttgatgatgtattctattttggaaaggatgatccttggatagatatgtcatttagtcatggcgtttcaagtgtagaaataactggtgttgtaagagaagtcaatgaagatgcaatgtaaatatgaatagtggaatagtattaaatattaaaaaaaatggtctgtttgcaactgccaaaaaaatcaagagaaagcttgatgaagaaaatgcatataaaatctggcaggagaaaaaccgacttgatgataatttgctagagctgcaaagaagataccttttcaaagaggactataaatttagtatagtcgtgccggtatatagaaccaatgcagaatatctaagagctatgattgattctataaaagcacagacatattctgattgggagctctgtattgtcgatgctagcgaatataaatctggtgaagataaagagactatcaatataattgaaaagtatctggctgatgataaaaggattaaatttaaagttttagaggaaaatcatgggatttcagcaaatacaaatgctgctatagaaatggcaacaggagattttattgtttttgcagatcatgatgatatgttagctccggatgcactttttgagtgcgcaaaacttttagagaatgagcctgatgcagatattatatattcagatgaagataaaatagttgctggtggtacaaaacgcttccaaccatatttcaaaccgaattttaatatagatcttttaagagctaataattatatttgtcatttgtttgtagtaagaatgtcgattgctaagcaggttggaattttaaatcctgacttggatggtgcacaggattatgattatattcttaggtgtgcagaaaaaactgattctatatatcatatacctaagatattatatcattggcgatgccatgaaaattctacatctgaaaatcctgatagtaagctttatgcatttaaagccggaaaaaaagcacttgaagaccatattaaaagaaagaaaattgatgctaaggttgaagaaggaccatatcatgggacttatcacatcatatatgggtatagtaagacaacgccaataactattattgtggttggtgatagaatatatgataaggcatgtgtggattcaattgagtgcagttccaagtatgttaataagaattacttgtttatagaaaaaaaagaacagataaaagaagttgtaaaagatatacgaactgattatgtatggattataaataacagatttgaagtcaagagcttaaaatgtatagaagaaatgcttggatatttaacaagaccggaggtaggagcagtaggtgcaaaaatatgtaataagaaatatattttgcaggctggcatagatgtagatcaggaaggaagcgttatatatccgtttaagggatatggaagatccgaagcaggaaattttaacagacttgtaagtacaagagattgttattcagtctcatcagactgtgtgatgttagataagagtgtattattatctatgataatgccggataaggctggatgtgagaatgatttagaattaatcctgggtaagactttgaagaaattaaataaatatgcagtatacaatccatatattgagattgaagcgcgataaaagataagcaattgaagggtgcaggttattatttatgaatactatcaagcaaaatataaaaaaagtagcaagaccaatttatcataaagtagttccggagaaggtaagagcacgtagggcagcaagattaaatcgcagtttggaatatgaaacatggattactatgcttgaagcaaatgagaactatgatgagaagtttgaatataatcctaagatttcaattttggtacctgtttataatgtactggacagacatcttattccttgtattgagtctgtacttaatcaggtatatacaaattgggagctttgtctggctgatgactgttcttcatgggatagtgtgagagagactcttgcaaagtatgaaggaaacgaaaaaatcaagattgtctacagaacagagaatggtcatatttcacgttgcacaaattcagcgcttgaaattgcgacaggggaatttgtcgcatttatggattgtgatgatgtattgcgtccaaatgcactttatgaagttgtaaaaaaattgaatgaaaatcccaatttggattttatctatagtgatgaggataaaattgatgatgatggtttcaatagacatatgccacattttaagccggattggtctccggatacattaatgtcacatatgtatacttgtcattttggagtgtatcgcagaagtattgcaaatgagataggtggattaagagctggttatgaaggtgcacaagactatgattttactcttagatttactgaaaagacaaataaaatagctcatattgataaaatcttatatcattggagagaaagaaaagaatcaacagctttggatccatctgcaaagccatatatattcgaggctgcaaagaagagcaaggaagatgctcttgcgagacgtggtctcaaggctaatttggaaatggtagatataatgtatcaatatagggtgaattatatctcgcagaccaatccgcttataagcgtgataataccatcaaaagacaactataaagtcttaaaaagatgtatagagaccttgtatgaaattaccagatataggaattttgaagttattcttgtggacaatggaagcaatgacgaaaataagaaactgtatcagggattagcagacaagtataattttagatatatctatgaaaaaatgaactttaacttttcaagaatgtgtaatataggagctaaagaagctaagggtgattactacttatttctaaatgatgatattgaaataattaatgaggaatggcttgaaagaatggttggacatgcagaattagagcatgttggagcagttggggcaaagctgttatacccgaatagtaagaaaattcagcatattggtgttatcaatattgctaatggtccagttcatgcatttataggttataatgatgataatatatattatttcggacgaaataaaatagattataactggcttgttgttacggctgcttgtatgctcgtaaatgctgcaaagtttaataaagtaaatgggtttaatgaggatatgccggttgcatataatgacgttgaactttgttttaggcttgtagaggctggatattataatgttgttaggaatgatgttatactttatcatcatgaatcggtaagtcgtggtaacgatttgaaaagtgagaaaaagtttaaacgattaatggcagaacaaaaacatttatataaattgcatccgtactttaaaaataaagatccattttatagctcaaatctgacacagcatgctcctgatttctcatataatatgatgaaagagaatattggaaagtgtgttgttgaagaatgtacaaaggaatttgatatttgtagaaaagttgtgaatgcgattgataatatttatgtaggaaataaatgtataattgagggatggggattttataatgaaaaaccgtataatgggaatatacaattattactgaaatcagataataagtcctatctaataactactcgtaagatttttagaagcgatttggctattcattttaagcgaaaaccaggtgcagaattatcaggatttatatgtgagtttgacaaaattgatgcaggtaagtatcaaatatatgtgtgctgtaatggaaaagcaacgaagacaaaacgacatattataataaacaaatgaaatcatttgttgtaggagtaagaaatgtcaaaaaaaaatattagcaaaatatcattatggattttaatatttagtatattaagtcttgtgacagtagccatggtttggtcccctcgtaaagaattaaagattcgcggaaatgctgataatttattagaacgatatgatacatcggatataatagaatatagcggttgttatataaatcaaagtggtcaaatttgtattaatggagtagatccgcatattgtttttaaaaaagaaaatattaagaatgtaacaacaattgttattaaattaaaagataaagtatctggcgatttagatgtacagttatattttgatgatggcaatgaatttaatgaaaatgatagttgtataaaaactgttttttcaggggatgacaacgtagggtttgaacttactaacaaaagccttaaacaaattagaatagatgttgattctgattttaactttgatgatatagaaatatattcaggtaagtcaataattagtattgacaaagaaaatatgcattatgaaagaataatttactctatttgttttactgtttttattatatcgattttattatttatagacaaaaaattgaattttagtgatacaattatttgctttatcggtagaaaatataaaatagcattaagagatttacttatatttatagtttctttggttataggagctataattgcgtattttgttagtggactaaagtttatgtatagtacgtggctattttgttctgctatagtcgctattattttatttatattgattagctatagaacgataaaagataagccggagaaattacttgtcaggctggtttttgtttcttctattactatgttatttgtttctccaattggtcatattagttgggatattgattcacattttaaatttgcaataagttcttcgtctgttgcacatataggtttatcagaaccagagttagaagtcttgactaatggggggaattttattcagaatacagacacttatgctcaaaatattgaaaagattaatactttaaaaaagaatagtgatgcaataataaaatatatagatcataatatttctttgacggcattgcctagtggagttgtgattgccttgctaagattgtttggagcaaacttttttgtgatatataaatttggacaaattccaatagtattagtatattcattatgttgttattttgccatgaaacgattacatagtggaaaaatgatattagctgttgtggctatgtttccaacatctttatttatagcaagcaattattcttatgatacatgggttattggatttgtcatgattggaatggcgtattttgtgggcaactgtcaggaagaaggtgtggtttcgacaaaagatacggtcattatggttatagcatttgcaatagcaataattccaaagcaaatttatttagcatttttgataattccatttttgatgaaacggaacaaaattgagaataagaaaaaatattatagcatttgctctatggcctttgtaattatgttatttgatttgctattgaaaaccatttttgaaacttcaaaaggcggtgatgtaagaggtggtgcaggtgttaatccaactgaacagatattgtatattattcataacccagtagaatatacacgtacgttattaaattttttgaaagactatttgtcaattagaaatatgaatgggtttattgatcactttgcatatctgggaattggtacaacaacagttgctataatagtatttgcatttttggtttttacaacattaacagataaacgtgaatacgacgttaaggcatattcgaaaatagtttatatatatgatattttgatgttttttggaacagtagttttgatagctacatcactgtacattgcatatacagaagttggttcaaatacaatagctggatgtcaatcaagatatataacaccattgatttatccattatttgccgttttgggtggtagtggaatcaggttgaaatttgattatagagtatataattatattgtaatgataattatgcaaagcgtttcaatgtggtgcatatatcagtatattttaatcaaaatgttatagggaggaaaaatgataaaacatgagtttgtgatttgtgcatataaagaaagtaaatatttagaagattgcataatttcattgaaaaaacagaaaaaaaaatcaaatattaagttagcaacatcaacaccgaacaactatattgaaaatttatgtaataaatatcagattgaaatgttcgttaataaaggtgaaaagggaattgcgggagattggaattttgcatattcatgctctgatgcgcaatatataacaatagcacatcaggatgatatttatagagaaaattattcaactgaaattataaatacatttgataaatatccacatgctttaatcgcgttttcagattactcggagctcattaatggaaatttttctgacaatgggtttaatttgaaactgaaaaggataatgttaaagaatttaaggaatcatgacaaggcatacagaattaaaaataagagaagtgctataagacttggaaatgcaatttgctgtccttctgttacatattcaaaggaagctttatgtgattatgaaccgttatttaaaacaggttttagaagtaatgttgattgggaaacatgggaaagaatatctagagcagagggggagtttttatattgtaatgaaatattaatggcacacagaattcatgaagagtcggaaacatcagcagtaataggagataatttaagaagtaaagaggattatgagatgtttttaaaattttggaatagaccggttgcaaaggtcttaacaaaaatatattctcttagtgaaaaagaaaacaatgtatagaaagtaaggtgtagatatgaatcggctattaatagtaatcccagcgtataatgaggaagaaagtatagaagaagttgtaaataatattaaagaaaattattcacaatttgattatgttattgtaaatgatggctcaaaggatagcacatactcagtttgtgaaaaaaataaatataatataattgatttgccaataaatcttggattggcaggaggatttcaggcgggagcaaaatatgcttatttaaaaggttacgattgctttattcagtttgacgcagatggacagcatttacctgaatatatcgacaaaatgttaaagaagcttgatgaaggctatgatattgttattggttcaagatttgtggatgaaaaaaagcctatttctgctagaatgttgggaagcagacttatatccacagcaataaaactgacaactggagtaaaaataaatgatccaacatctggtatgagattatatagcagaaaatgtattaaggaatttgcacaggaaattaattatggaccagaaccggatacgatatcatatttgataaaaaatggagcaaaggttgctgaggtgcaggttgaaatgaaggagcgtgttgcaggaacaagttatttgaattttgcaagatccatttcttatatgtttagaatgttaatgtctatattgtttgtacagaattttagaaaaagatagggaggatatagagtatgtcaacatcattgagagttattttatttgttgcgtcattatgtgtttttttctttataatgaagaaaataaagaaagcaaaactaaaaattgaatatgctttattttggattgtatcaagtattttattattaattttaagtatttttcctcaaattgcatatttttttgcagatatatgcggaataaaaagcccggtaaattttatatttctattttcaataatggtactttttgttcataatttttatttgactttaagaatttccaatttagataatatgataaacagtcttaccgaagaaattgcagtgagagattattataagaaagaagaggaaaatgaaagtaaataaactattaacaatagcgtgtcataaatatgttagtagtgagacctctgaaaaaaataattttgtttggaatatgattggaagcatgatatttgcggcagcatcaatgatattatctttattgataattagaatagttggtgaagatgatggaggaatttttgccatagcaataacagtagcgcagatgcttgcttttatagagtattatgaaacaaggacatttcaggttacagatactaaaagcacttttgaatttggacattacaaggcagtaaaatatattttatttgttgtgtcggttgttgttagtatcgtttattcaatattgacagctaaatcaaatatatataagtgcatcgttattttattgatgtgtatttatagatttgttgatgcatatgcagatttatacgagggaacatttcaaaaagatggtcgtttagatttaacaggaaaatctcaagcatttagaacggttatgtcagttactgtaatgttagtagttcttattattacgaaaaatatgattttagctatatcgttgtcaattcttattgcaatacttggtttaattatttttgatgtaatgccgatgaaaacatttagaaatatagctgttatctggaatgagaaatatattttgggtattctcaagaattgttttcctttatttataggttcttttttatggtcatatattttaagtgctagtcgaatagcaatagatgcaaaaatggcatcaaactattcagcatattttcagacattatttatgcctgtttctattgtaaatctatttgcaacttttgttatgaagcccgcgttaactaaattagcagacgaatatgcttcagattataagaaaccatttattgtttcaatatcaaaaatatcagtaataatagtaggctttactataatttgtataattggggcttggattttaggaattcctgtattacagattttaacgggttcaaaattaatacaatataagatggtattgattttacttatgtttgcgggtggaattaatgcgttatcttattttggttattatgttttaactgtgatgcgaaaatcaggaatgataattataggatatatagtttctgctatagttgcgaaattggcaaatgaatacttagtggctagatatggaataaaaggtggcgcatacggttttctcacttctgtaatggtgttgtttttaatattttatttttgtataatctatacaattttaaaaaagaacacaaaaagagattaagaaaaaattaagaaaaaattaagaaaaagttgaaaaaaatacaagattataatataatactccttgtttctttatatataaataaggggtattttattatgcgaaagataaaaaacgaattatgtaataatagacgcttgttaagtgtagttttagctataatagacgtggcttttattgcgttattattaattggattatgtataggaatattcggaaaacatacatataatttttcgattgaatatggagaagagcattcaaataaaaactatgcccaaatgtattatgcgcccagtgttaagaaaatgacagaagaggatagtattaatgcatattttgaaaataaaaaagcgaatttcaaaataaaaatgagtctggcagaaatcaacaataatttatttagagttgatcctataaatacattagaggtatattcgattaagagtattacactttctgatttttggggaaattccatagaagtatctggttcgaaactagaaaaatacatatcatctcgtaaggatgttgagtatgaggtacatgatgatggcttgtatattactgcacttactcaggataatatgtttattttgtcacaaaaactaaattataaggtagttaaactgtttttgaatagacaattagtattgttttatataggtacgttttgttatttgctatttggtattttgcaatttgtattattgtgtcagaataatgatgataagaaacatagtaggatttttaatttcctgtctgctttcataacatatatattaactgcattaggtggagcattgctatatggtttttggtatatgcagaaaaattttaaagatgtgccaataggacagataatatatcatttaaatacacctttggaaggaacaaatacttcatcattcagtgtgatatttatttccattattttgattattataatatgcgttttaatggttacatttggattattgatattcagaaaaaagaaaaataagtggatatataaattttggatgtcgcttttagggtgtatagcaattggatattcaattatattgtgttgtttccattttgatatcatatcgtatttaaaatatacaaagcaggattcaacgatatatgaagataattatgttgatggaagagatgtagcaattacattcccaaaggaaaaaagaaatctgatatatatttttttagaatctatggaaatgacatattcagatcagagcgttggtggtgctatgagtgaaaattatattccggagcttacacaaatttcattggagaatgaaaattttggaatatatggaaaattgaatggtgcgtatacgacttcgggcgcgacttttacaatgggtggattggttgcacagacatccggtgtaccaattaatgagaacttaataagtaatgataccttaaattcaaagtgggaatcagataataattatgttccaggtgtttgggctataggagatgtcctgaaaggagaaggatacaatcaggaatttttgattggttcagataagaaatttgctggacgttcatcgtattttcacggacacggaaactatgatatttttgattattatactgcaattgatagaggctacatagatgatgattatatggtttggtggggatatgaagatgaaaaattatttgaatatgcaaaaaatgaattaaataatttagcttctaaagatgaaccgtttaatcttacaatgttaacagtagatacgcattttacagatggctatgtatgtgaattatgtcagaatcaatatgatgaacaatatagtaatgttattgcatgttcaagcaggcaagtttccgaatttctggattggattaaacaacaggatttttatgataatacaacagttgttatttccggagatcatcttacaatggattctgattatatagaaagacaaaatgcaacagattttaatagaagaacatattttacaattgttaatggcgcagcggttaatgaaaaaccatgtgttgaaagagaatatacaactttggacttgtatccaacaacattggcagctttaggggttcaaatagagggaaatagacttggattaggaactaacctttattctggagaggatactttgattgaaaaatatggtctggactatataaatgttgaattattgaaagattctcaattatataggaagaaattgctttatggtaaaaactaaataaaataggtaaaaagtctttaaacgttgtctttcttgttgagataaaatatgaaatactagcatttcatgatacatattatgagttgataattaacttgttgcaatccgtcgaattataaaaaatcttaagaaaatataaaaaggtaactctttaaacgtcttttcttatgtgataaactatattttagatttattacaaaaggaaaggcgttttaagatgaaaaaagtagtagcactgttgttgacgctttctatgctgatttcggcaaacacttttgtttttgctgattctgcagagacaggtaatagtacggagagctatcaacaacaagataatagtgaaaatcagatagttacatatttatctgttgcagatccatctgttaaaaagggagatgctgtaaggataattgttggattagcggatggcattgatcaatcaaatgctagattaacagttgaaaataccgatttaaatcagtcatttgaaataagtggagagatgacggaggatggaaacctgatatttgaatcaagtgatctggtttcaggctgttatacagttaagtctctcgaaactgacgggtattcagtagactttgaagctattggaattaattcacagtttggaattgatactgttgtaatggatttgaatgctgatgcatatgcggaggattcagataatagcaattcagataatgaaaatacgggcagtgaagtgtatgatgcagtagtaataaatccggatgaaacatcaacacaagctgcggggaatacaattagcgaggctattgcagcagcggctgatgtacagcagaataatctctttagagctagttcggcagtgaatgttgttcttgatccggggcatggcggcaacgatggtggagcacaggcaagttatggtggaaagacctatttagaaaaaacacttaatttgaagattgcacagtattgcaaggaagaacttagtaaatacaaacgtgtaaacgtatatatgacaagaaatgatgatcattatgtagctcttgaagatagagtaaactatgctaagtcagtaggagcaagtgtatttgtttcaattcataataattcgacaaccagctcgagtgttcatggcgcaacagtttattatcctaattccagcttaaatgcaaatattggtgcacaggggggagcattagcaaacgaggttcttaaacagttagtcgcattaggactggcaaatgatggaacgcgtatcagaaattctgagagtggagatacctatacagatggatctatttgtgattactatagtgtaataagaaatagtaaaaaggccggtttcccgggaattattattgaacatgcgtatataagtaatcaaagtgacgcgactaattaccttggatcggagacagctttaaaaaaacttggcatcgcagatgcacagggaattgttaattattttggattaaaacaagaagactatcatcttatatttgacgcatcatattatttgaataataatcctgatgtgaagaataattggggaaatactgcagaagctgcactgcaacattttattaaatatggcatggctgaaggtcgtcgtggtaatgaaatttttgatgtgcatttttataaggataataatatagatttgcaaaatgcttttggagataattggtatttatattatcagcattatctagaaaatggaatacgagagggacgtcaggcaagtgagaattttgatgttataagttacaaaacaagatatagggacttacaaagtgcgtttggtgatgattatgagggttatgtagaccattacatatcatatggtataaatgaagaacgtgatgcgtcaccacttagatataaagtggattttgttgataatggtcagattgttgagtcacagaatgttttgtgtatgagaggggcgaaagctccggaaataacaaagaccgggtatgtattatcgtgggataaggcatataataagatagcttcagatacaacagttaatgcagtttgggctccggttacagtaaaattaaatttcgatgcagcaggaggtaatattacaaatacaagcaagaatattacatatggcggcacatatggcgatttggaatctcctgaaagagatggttatacatttattggctggtatacagcagctaacggtggaacacagattactaaagatacaaaagtagaggttacatctgatcagactatctatgcacactggacagcaaacagctacgcagttacatttaatgctgatggtggaacagttactgctaatacaaaaactgttacttttggaaatgcatatggtgaattacctacaccgacaagaagcggatatacatttgcaggctggtggacggctgtagacagtggagaacagataagttttaacagtgcagtaaaaacagcttctgatcatgttctgtatgcacattgggtattaaacagtgtatcagtatcataccagacacatgtagcaaatatcggatggcagaatggtgtgtcaaacggagctatggcgggaaccgtaggcagaggactgcagcttgaggcaataaaaataaatgtaaaatcagatgcagacattggtgtgatctatacaacacatgtgaaaaatgacggatggcatggaaactcgttcaatggagaacagagtggaacaaccggccagaataagcatgtggaagcgttgatgctaaaacttaccggtaaagatgctgataagtatgatatatactacagagtacatgcacagaactatggctggttagcctgggcaaaaaacggagaggcagcaggaacctcaggatatgcatatagacttgaagcaatccagatagttgtaacggcaaagggagatatggctcctacagtattttatggaggatacacatctaataacgcaaaagcgtatatatcaaaaaccagtactgttccgataatcaacacaaatgcatcggtaagatatcagagccacgtaagtaatatcggatggcagagtgcagtggaaaacggaagtctcagtggaacaacaggcagaaatcttggacttgaagcaataaggatagatcttgacgggcagccgtgttcaggaggaataaaataccagacacatgtacagaatatcggatggcagaatgcggtggcagatggtgcacttgcaggaacgacaggcagagctctgaatgtagaggcaataaatatgtctctgacgggagaaatggcaaatcaatacgatatctattacagagtacatgcacaaaattacggatggcttggatgggcaaagaatggacagaatgcaggaacatccggacaaaaccttcatttagaggcattgcagatagtattagtgaagaaaggacagtcagcacctggcaacaattatggtggaataatttctaaaaatacaatggcatatattgccagataaattaataaaaaagaaactgatacagataatttgtattagtttctttttttgttgtgcgcctagcggcgcacgtttctaacgggttaaagtcccgaatccgcctggtagtgggaaggatatagccgaaggccctcatccacctgtgtcggtttacggtacgggcacgcattacacaatagcagcttttctcggcacatggctcacacgcttcactactttatttcgctccacatcacgtcttcggatcatacaacggatttgcctattgtactcctaccccgcttgtaccggtctttccattcccggctcgtgctttccacatgcgtccctacagttctgataaccttagatattcggccgaaaggattcccacctttctctcgctactcattccggcattctctcttcttatccctccactactccttccggtacagcttcgtcggttttaagaatgctcctctaccactcgcattgcgagtccacggcttcggtgtcgtgttcgacgatggagacggagagattcgaactcttgaccccctgcttgcaaggcaggtgctctcccaactgagctacgcccccatttgggtaacttatttaattatccaaagccattcggctagtgggcttgagaagactcgaacttccgacctcacgcttatcaggcgtgcgctctaaccggctgagctacaagcccataaatttggcagccacctacttttccataccgttaccagtatagtatcatcggccgtttaagtcttaaccatcgtgttcgggatgagaacgggtgtttcccaaaggaaggtgcggctggatcacctcctttctaaggaaatcgagtagagagtttttcactgttgagttatcaatagataacagaatatttccggtggcgatgcgcttttgggaaacacccgtccacatcccgaacacgatggttaagactgaagcggccgataatacttgatcaccagttttagttctcacagacttttgactgttttatcagtcattagaaatcttaatctcttaaaatctctaatcactggtaaaaccagctatctaaacagcacttccctgctgatgtaggttagctctttcgagcctgttctattttgaaagcatatatgctatgctgttctttataaatccggcagccacctatcttcccataccgttaccagtatagtattatcggccgcttcagtcttaaccatcgtgttcgggatgtggacgggtgtttccttcctctgcctacagaacaacattttataaaaccaaaaccacatatgctctgttaacgtatcataactgtatattttttttagcttccttagggaggcttatttctggtgccataatacaggactgaattataaattctatgtatttctatgtgtacacgctatcctattataaatagagtgtcagaattaaaagtccatatagagttgacgcgctttgttcaaccagaaaaaatcgaaattgatgcaaacgagagggcagttaatgaaaagtctcaatactgctttttcgtttgcaccaccttcgattctttccttaacgatttatctattttcataatcaatcaaaatcttcttacaactactacaacgataagcttcacaatgagggattccttctgaccctttactcaattccagatcgtccgattttttaatacgaaaagcttttatcggattatcaactgcaaaagtaatgtctagtgaactcattaggtatcctcttatcatttcatcaccacaatatggacatttcatgcagattcacctcctataaattctgatttgataagctcctctaagagattatgtttcaattttcttctatgtatttcactactctatctatatttccgctttcatnnnnnnnnnngataagctcctctaagagattatgtttcaattttcttctatgtatttcactactctatctatatttccgctttcatattcatcatgtgttaatttgaaacactcatccttactaacactgctgtagtctatatacctagcaatatcttctggaattaaaaacaagtttactccttctcgtttcagcgattgtaaatctccgtgattgacatcaacaattacttccgcttcccaattttttgctttaattnnnnnnnnnnnnnnnnnnnnnnnnnnnnnnnnnnnnnnnnnnnnnnnnnnnnnnnnnnntggctattttttttatcattaacttgtcctccttttccacttcttataacttctaattttacttaaacttttttcaccttaaaaaactgggattttcgcattatttctgttgtgccttaacaaaaatgctctctgttacaagggctatcgttataagggctcctacaagggagtaattgtttaatccatacatcaacggcataagagaaataactgctgtaataatcgaaagaacaaacaaggcgttaaaaacgctatctttcttcaaagaaatcaacgaaagcaacaaaataacaacagtaagtatggctgtaataagtggagcaaaatttgcatatccaaacggtataagactaaagtatgaaaatgtttctcttactctttctgttggagatggagcaaaagtacaaactgctcccagtggtaatgcttctaacactattgttaaagccggaaaaaccactaagctgatttttttcatgttgtgtacctccgtctacaaatcgtggtttgttgatgcaaaactattaagacttatcttcgttattatcgctcttaaataaaccgataataacaacaatcagacctaaaacaccacctccaaacgcaatgatattatctatggatagagcaattgccgcaagaatgattgctatacccaataacattatttttgttcccattcattccgcctccttcctatttggtgcttcatctgctccagacaaaacaccattatggcaaaagttagcaataaaaacatcattcatagtgcatccctctaaatgctccttcttcaatacaactcccagtttctttcacttcttgatgaagccattaaccttgatgaaattgttcctgtttcttttgttactcatttccacgcttcaaccggaatacctcgaaagcaccagctttatccgatgctcaaggcacttctactccagcgtatttttttcaatcccgacagatacgctcctgcttgcgttcctagagtactctcaggaacttcgtgatttctgcgactttgatgctgttccagatggttccaaatttacacgttttaaacaggacttcttgttggatttacgatcttcgaagacattggatttcgtaatgcttttattcctctccgtgcctatcctggcatagaacgtggctcgaaataatgggaagatacttacaagatccgtgtaaatgttgaaaattcaatcaaccatttcaaagatagttgcagcattgcgaatcgtaagacccagaatgagaaaacgcttcatgctgatttacttcttgccggaatcacccagcttgttactgtaattgtcgctgataagattcatcagtaccaatacattcggagtttgaagcccttgattgcctgattattaatatgcatataatcttttcttcgcagtttatctgggaaatcttttagtcatgtctaaatttagaagcacctacttttcatctttaagaatcctacgttgcagaattcttaccgctttttaatcaggagtgcgcacttgttccgcaattacctacttgttgtactttttattatcgtaactatccagaaccaccacacacattcacaaaaccgcacgatatttgtactttatctgcactctgtttagcatcgctgctacacagctaatttcgctcatatttgcggtatggttgcatggttaaccactcaagtaactaacctatgaacttataatagataatataaataatattgtcaactgtatttttctccatataaaaaagaccatacactcagttgttttctgaatgtatgatcctttaattcatcttattcccaacagcactatggtagttcaaatgtcagcctctcccctgtcgcaggatggtcaaaaacaatcttgtatgagcaaagtgcaagctgctccctcacaccgaaaccggtgcgtcctgatttgcttcccgttcctgagttatttgagacagtcttcccatacttggtatctccaatcagaggatagccgatatttgcaagctgcaaacgtatctgatggtgccttcctgtgagaagctttatgtcaaattctgttttattgcattcatttgatattatcccgtactgaagcactgctttttttgcctgcctgtctttttcgcttgtgattttagatgtattggtacgcttgtcgaaagagatataatctgtgagagtatgccatgccagatcatgattatcttctttattatcttcttccttatctgctcctgacactccctgccctctgcttgccgcacgataatatttctcggttgtatgctcctttatctgtctgctcaaagaagccgcggctttctgattcttggcaaataccatcactccctctaccggctggtcgagcctatgcactatgccaacatagggtggctcatttttagccgccctgtaatttcttatgaagctctccatatcctgctgccctatacgcctggtctgtgtagcaattcccgccggcttatagcagacgataatgtcgttgtcttcgtaaataatatctggttttcccatgttgtaactcccacaaattgttattgtaacttttaactgttcagcacatttacagttgcgatacgcaagcatatagccaagtgtcacctcacatacaaacgaaggcagcatcggtataaaataatagttacttattatattttatcaactcaatgagttgttagcaatggtattaaaaaactaattctgacaatttaatattctttttgcacattctatctgttcctttgtaggaggctccaccccttcaagctgatatggtataccaagctccttccacttgaacaccccaagtgtgtggtacggcagcacctcaaccctttccaccgttttaagtgtgtcgataaactctctaagctgctttaaatatctctcatccgtggtgattccaggcacaagcacatgacgtatccacatttttttaccgttttttgagagatattgtgccatatcaaggatattcttatttgtctgtcccgtaagctttttgtgctcctcgtcatctatatgcttgatgtccagcatgaagagatctgtatatttcatcagctcattaaatttgccgaaaaacggttcttccacggtaaacggatttcctgatgtgtcaaggcatgtgtttacacctttttcctttgcaaacttaaatagctctgtgacaaagtctatctgcaaaagtgcttcacctccgcttactgtgatgccacctgtttgcttccagtacgctttatagcgcatggcggtctttagcacctcctgcggtgtcatcagctttgcaccgtcattttcgccgcatttggcccatgtgtccgggttatggcagtatttacagcgcatattgcagcccttcaaaaatactatatatctcactcccgggccgtcggctgagccgaagctttctaccgagtgtactcttcctagtgtttctcccatgttttacctgccactcaaaatgtgttcaaatatactcaaacacatcgagaaattaaagtccttgcggatacttcttactgcttcgatgtgtatgctttggcgattgtaaacaatacgctactcacaagttcgtgtacactccacagtcgtaaattcctgcgatagcccgcagtacatacttacgtttgcgtttattatgcaacttcgtaagttaaagcatctcttagattaagagcagcattgaaatccctatcctcaacataaccacaatcacaacgatatattctatctgaaagcttcaaatctttcttgatagcaccacagcaatgacatattttggatgatggataccatctgtctacgactcttaattcaataccattttcatcacattttgctttaagcttggttctaaattcatagaacttctgtgacgcaacagcttttgaaagatgtctgttcttcatcattcctgatacattcaaattttcaatagttatataagatggcttggttttcactatctcagctattgatttattgatataatcagtacggatattatctattttatgatgaagtctttgtactttgagcttttgcttttgtatattcttttgagtggactctcctttctttaagttctcatattttcgtgagagacatctttgttctctacgcagtttcttttccaattttttaattcttgttgacttattgatatttttataagttttaccattggaaacaatcgccaagtcttttaaacccaagtcaattcctataccaccattgctattattagcaatcttaacgttgggaatttctacaagaactgacacatagtatctgtctgctttgacggatactgtaccgcttttgattttccatccgtctttagttgttggtatataacctttttctttaatgcgtacccaacctaaagtgggtatgttcagcctatgtctctcacatctacagtctttagtattgttctttacgaaatacatttttacatcagatttacctttctttttgaaattaggaaaagcgctttgatgtttaaaaaatcttgtaaatgcagtacatccatcttcaatagacttttttacagcttttgaatatgcttctttaatccatattttatcaggattattaggaatatactcattattaagccatacgctgaaactcttgccagtcataaacttttcaccgttatcatataaagttttgttgtgaccgagatagaagttatagacgtacctacaagtgccaatagtcttgttaatcttgattttttgctcaatcgtcggatttatttccgtcttgaagctctttagcaatttcctcatccctttctatttgtttttcatacttacgaagtccatacaacctgcaagagaatacatgaagtatagaaacaatatcctgtacgagttcttcctgtggtgatagttcttcgttgttcactaccacaatgcttgtattaaacttcatacagaatttttcaaaccaatcgtaaccaaatctgataaatctatctttatgagttactattatggtttttattttctgttccattacttcatttaataattcattccactttttacgattgtaattaagaccacttccataatcctcaatacactggtctataataatacctttagcattacaaaactgtcgcaaaaatgcaacttgattctgtaaatcatctttttgatttcttgtagacactctggcataaataactacctgacgtttatcattttcaatatttatgcctttgaattgaaggtactggtcataggtataataacgcctatcagttggagttcgatttgcctttaaagttccttctctgtcccagcgttgcaatgtcttaacagacacacctaacagttcagcaaaatcttttggcttataatttgtgatatttgatgtattcataataatttactcctttgagtatatttaaacacatttaatcacatttaacaatatattcaattacttattttctcctcctaggttgttgctactacttttattttatggtacggaattttcggcaacccgccagccgggacttttcaatgctcaggttcttcgggctaagaggctgtatgaattatgattttggttttctatgcttgacgcgaccggcttttacacaccttccgaaaattccttacgctgtggtgttatttagaaaatcagaatatgcaggcacttggcctgcacattctggaatgttggatatttttttatattacattctctcgtggcatgtacgtgagattacatcgagctgctgctctcttgtgaggtcgatgaacttaactgcgtatcctgatactcggattgtgaagtttgcgtactcctccttctcaggatgctccattgcatcgatgagcttctctttaccgaatacgtttacattgaggtgatgtgcaccctgatcgaagtatccgtccattacgtttacaaggttgtcgattctctctccctcgttgtttccgagtgctcccggattgatggtctgtgtatttgagattccatcaagcgcccactcatatggaagctttgtgagtgagtttaaggatgcgagaagtccgttctgctctgcgccgtatgatgggtttgctcccggtgagagtggctctccggctttacgtccgtcaggcattgctcctgtagcttttccgtatactacgtttgatgtaattgtaaggattgatgttgtaggctctgaatcacggtatgtgtgatgcttctttaacttgtccatgaatgtcttaagaagccatacaccgatttcgtccgcgcggtcatcatcgtttccgtatttagggaactctccctcgatttcgaaatcctttgccagtccgctctcgtcacggactactttaacctttgcatatttgattgctgaaagagaatcgattacgtgtgagaatcctgcgattcctgttgcaaatgttctctttaagtctgtatccatgagtgcaagctctgctgcctcatagtagtatttgtcatgcatgtactggataaggtttaatgtatttacatagatgtctactaaccagtccatcatcttgtcgtatttcgccattacctcgtcatagtcaaggtactctgctgtgataggtgcgtagtttggtcctacctgctcacctgatttttcatcaacaccaccgttgatagcgtaaaggagacattttgcaaggtttgcacgtgctccgaagaactgcatctctttacctgtctgtgttgcagatacacagcagcagattgcataatcatcgccccatacaggcttcattgcgtcatcgttctcatactggattgagcttgtctcaattgagatgcgggctgcataatccttgaaggtctgaggaagctttgatgagtagaatactgtgaggtttggctccggtgcaggtcccatgttctctaatgtatggaggaaacggaagtctgtctttgtaaccattgaacgtccgtccacacctgttcctgccacgtcaagtgttgcccatacaggatcacctgagaataactggttgtatgaaggaatacgtgcaaatttaaccatacgaagcttcattgtaaaatggtcgatgagctcctgtgcttcctgctctgtgaggatgcccttgtccatatctctcttgatgtaaatgtcaaggaatgtagatacacgtcctactgacattgctgcaccattctgtgtcttgattgctgcaaggtatccgaagtataaccactgaactgcctcttttgcgtttgttgcaggtcttgagatatcatatccgtaaatctctgcaagcttcttcatatcctcaagacatttaaactgctctgcgatttcctctcttaaacggataacatcatctgtcatctgtccacagccacagtttgccttatccttctttttctcttcgatgagataatcaagtccgtataatgctacacgacggtaatcgcctacgatacgtccacggccgtatgtgtcaggaagacctgtaaggatctttgcatgacgaaccttcatcatctcaggtgtgtatgcatcgaatactgctgtgttgtgtgtcttatgatattttgtgaaaatttccttgagcttgtcgcttacattgtaaccatatgtctcagcagcctgtactgccatcttgattccaccgtaaggcatgaatgctctctttaacggcttatctgtctgaagacctacaatctgctcgaggtcctttaatgactcatctatatatccagggccgtaagctgtaattcctgttacaacctctgtctccatgtcaagaactccgcccttggcacgctcctctttctgtaatttctgaagcgcatcccacagcttgtttgtagcatctgtcggatcagctaaaaagctctcatctccgtcgtatggagtgtagttgtcctgaataaactgacggacgttgatttcctctttccaaagacgtccttcaaatccatcccactctttcatctctatcattgtaatatcctccttaaaatgtatgaatgttacttcgtttgattagttttgtttaactgtggttagtatatacttactacagtatttttgtcaatatccctgttgtttcttttgagatacattccctggttatttacacgaccatggctgattttataatcaaaaagagccaactgtccgggtttatcgcccagacggtcggctcttatttgttatatttcatgtggttattccacttatccgtcagtcatataacacgttcatagtagactatttttctcaataaagcaatagtgttttagaactatttttattcttttctattccgcacggaccgcccagcgcatcttcgtagacctggcacgtccgttctgagcacattcctgtgctgatgggcgaatcacatccttggaatagtcgctgtatattcctgctttatatcctgcctttagtgcctttttgaccagcttgtcctctcctgaatggaaggtaaggatggcagctcttccgccgggctttaatgctcccggaagcttttccataaactcatatagtacctcaaactcatggtttacatctatgcggagcgcctggaatgtgcgctgacaggtctttttgattatgtccttcttatccttttcaggcagaaaatcaagtgtctgttctataatgtgacgaagctttgtggtcgtatctatgcggttgcctttcctgatctcgtctgtgattgcttttgcaagctcctcgcaatacggctcatctgagttctcatagagcatacccgaaagctcctcacgggatatattatcaagacgctctgccgcactgataccgacatttggattaagacgcagatccaacggtccatccaccttaaatgaaaatccacgctcaggattatctatctgcattgatgaaactcccagatcggcaagtatgaaatcaaagcctcctacttcctttgcaatctcatctattgtgcagaagttctgaagctttatggtgagaatatcctctccaaagcctgcttcagcgagacgcttttttgtcttttcagactcgattgggtcaacatcggtggcaaacatatgtccctgtccttcaagtttttcaagcattgcccttgtgtggccaccgtatccgagtgtggcatcaaagcctgtctgccccggctttatgtccagaaaatctatgatttcttttaccattatggatatgtgcatgcccgcaggagtatttcccttgctgatgacatgctcaattgtatccttgtatttctccgggtttaattccttgtatttttcctcaaattttttgggatattttccgctataatgcacgcggcgcttgtgctgtttttcttcgctcattttatgctccgtttcattctgggttagaactgttatgctgacttttgctacagtataacttttattttacttttccgcaagataatgacttacattcctataccatctgcacgagccacacgtcgcttttcaccatgaagtatccgatgactacctttatcagctctgtggcctgcacgaggaagtacaccgctactatgccaagtgcagtgtatttggcgagcacaaatgccaccggcaccactatcacccacgtaaatacggagtcaaacagaaatgtgaccagtgtcttgccgcctgagcggagtgtgaaatacgacgaatgtgtaaatgcacaaaacggcataattatcgctgataccgctatgaagcttgttgcgagtgacttgatttcatctgttgtgttgtatatctgagggaaaaatccgcctaccagaagcatgaccgccgccattatagaacagcagaacacactgaacactatcatcttgttatccgcatcctttgccttttcaagctcaccggctccaagatactgccccacaactatgctgatgcatgcgccaagctgtataaacactatattgaaaaggtttgttatcgttgtcgcaatgtttaaacctgcgattaccgagagtcctcgtactgaatagcactgtgtaaccgttgtcatgcctgctgcccagaacagctcattgagcatgagtggaagtcccttgatgaatatagtcttaaactcaccaaacggcattcctattcctctgtaagcgccctcgagatatctgttcttatccctgtttttatgcgcccacagcacaactattattgtctcaatatatcgcgacatcaccgtggcaatagctgctcccgccacacccagctttggtatcggtcctattccgaagatgagcagaaaatcaagcaccgcattgcttccaactgctgcaaagcttgcaaccatcggtacaaaagtctgtcctgtttcctttatgtttgtcgcataggcctgtgtcaccgcaaacggtataagacctatcataacaatttccagatattcctttccatatgccagtgctacctccgtggcaccgtttcctgccgtatctgtcagataaagtgatatgaaacctgttccgttcgtgataaacagtgtcatcgctattgctgtaacaagcagcgctgcatacagcttgaatctgaaggaatacatatgccccttatgatttcccttgccaaaatactgtgctccgaatatacttgccgctgacaccgccccaaatacagccagattgtacacaaatatgagctggtttacgattgctactcctgacatctgctctgtaccaagctgtcctaccataatgttgtccagaaagcttaccagatttgtgattgcattctggattatcattggtatggccagcatgagatatcgcttataaaatgccttatctcctatatatttttgtctgaatttatgcatgtttgtcccccttttgatttctccatggttctttcgtgtaatgctactattttactacgtcagactttatttttcaaatattttatgtgtttttccttaacttattttaaataaaaaatacattaaagctcccggctgacaacactatttgtgctgtcactcgggagctcttaatttaattctttattatagttttactttttatgtcaatatcctgtttatttgtttactgccggttcatatcctgtgtttcctgatatttcctgattacgaaaaacattgtagttccatcaccctctttgctggtagcccatatcttgccgccgtgatcctctataatcttctttacgatggaaagtcctatgccgctgcctccggtagccgaatttctcgacgcatccgctctgtaaaatctgtcaaaaatatatggcatatctctctggtcgattcctcgtccattgtcctcgatttcaacctgtatgaagtcaccaacatcatttatcctgatatttatatagctttgtgtcttgttcatatacttcaccgaattgccgactatattattaatcacacggcgaagctgctccggatcagcaatgataagcacgttgctatccacatgattctcatatgaaagcctgatattttttgcctcaagatcgagtcctatttcctcaacacagtcgttaaaataatctgtgacatttatcttcgcaaaattgtatggaatcctgttcgtatcaatcttcgagtaaagtgtcagctcattaatgagcttatccatatcgtttgccttattgtaaatggttctgacgtatttatcgaccttttcaggggtgtttgccacaccgtcaagtatgccctcggcgtagccctttaccgcagtaataggagtctttaaatcatgtgcgatattgctgattaacactctgttttcggactcattcgtcaccttttcctcggcatttttcttgaggcgcgcacgcatctgctcaaacgcagtacacagctcgccaatctctccgtcgctcggactcgtctcaagctcaaagtccagattgccatccttgatattttcagcggcaatacgcagcctctctatcggtgtgatgatactcctgtatatccacactataagcatggcagccgtagtaagaagtataaatacaagcgcaaatgctccctctatcaaaacagtcctgacctcagggatcacgcacgcggttgatgtcactatgtaaagactcgcctcgtcaccatcactgtcacaaaaattaagctgctttatgagcaccttgtcatcactgtccatatagctgctcacatcagagctgctctgcttattggatattcgcggaagctttctcaaaatatcatcattgtcaattccaccattgaaaatgagctctccttcacttttcactatgagatatgaatacttcttctccagcttcttatttatcttagtcagataatcactatcaagaagcttggatggttctatgagcgatgtcttctcgagctcatcatatgtgcgccctgtcaccttgttcagaaactgcaccgtgtcagtaagcgcgagcatgcccgcatcctccatgccatatgtcttgtttatggcctttagctgaatcttattgaaacccacaagcactatactggtgagcacaacaggcacaaaaataattatgcagaatgatatagcaagttttgtttttatcttcatagtattctccatttgaataaattaataagccaatttatatatacaacaaggacatatccttttgaatttgatatgtcctattaatactacaatatctactatattttttaaaaatcactacagcttaaaacggtatccaacaccccaaatagtctcaatatactgtggctttgcagtgttcatctcgattttctcacgaatcttcttgatatgtacagtgactgtcgcgatatctccgaccgaatccatattccagatttccttgaagagctcctccttggtaaatacatggtttggattctcagcaaggaatgtgagcagatcaaattcctttgtggtaaactgcttttcctctccgtttacccaaacacggcgggctgttttgtcaatcttgatgccacgaatctcaacgatatcattttcatgtgtagcgcttccgatcaggcgctcatatctggccagatgagcctttaccctggcaacaagctctgatggagaaaacggctttgtgacataatcatctgcaccgagtccgagtcctcttatcttgtcgatatcatccttcttggctgaaaccatgagtatcggtgtattctttttctcacgaatccgcttacaaatctcaaagccatcaatgcccggcagcataagatccaaaataaacagatcaaaatcctccgccaaagcccttgcgagaccgcttgtgccatcattctccacctctacctcaaagccgctcagctccaggtaatccttctcaagatcagcaattgcaacctcgtcctctactatcaaaattctgctcatatccgttcctcctgaaaatttattcgttatcgtctgcctatagatatgtttatagttacatttaaaattttattattcgcgtatcacctataccttcgatatgttacctaataatctcaggttattataaatcattataatcatcatttgattaatctcttacaactaaaccatatataaaaaagccatggaaaccgactcaatgtcagtcccatgacttaattatatcatatatccgataacttctgtctaaattttctctaaattctttctaatataatataggactttgtttagagatacttcttgaggtcattaaccttatcaagtgcctcccaaggcagcttgatatctgtacgtccgaagtgtccgtatgctgctgtctggcggtagataggtcttctgagatcaagcatcttgatgattccggccggacgaaggtcgaaattttcccttacgatttcaacgattctgtcatctgcaagctttcctgtgccgaatgtatcaaccatgatagatgttggctgtgcaacaccgatagcatatgaaagctgaatctcacacctgtcagcaaatcctgctgctacaaggttctttgctacgtaacgtgctgcataggctgctgaacggtctacctttgtgcagtcctttcctgagaaagctccgccgccgtgacgtgcatatccgccgtaggtatctacgataatcttacgaccggtgagacctgcatctccgtgtggtccacctattacgaaacgtcctgtaggattgatgaagaactttgtctcagcatcaatcatatcctttggaaggattgggtcaaatacatatttcttgatgtcctcatggatctgctcctgggtaacatcctcatcgtgctgtgttgaaagtacaactgcctcaagtcttaccggctttcctgcctcatcatactctactgaaacctgtgtctttccgtccggacgaaggtatgtaagtgtgccgtcttttctaacctttgtgagctggaatgcaagcttgtgagcgagtgcgattgggtatggcatatactcctcagtctcatttgtagcatatccaaacatcattccctgatctccggctccggtgtcgaggtcgtctgtaaggtcgccctcttttgcctcgagtgccttgtcaactcccatggcgatatcagcagactgcttgtcgattgaaaccattactgcacatgagtttccgtcgagtcccttctttccgtcatcatatccaatctcaagtgctgtttttctgacaattgcagggatatcaagctgtgcctttgtggtaatctctcctgttacaaggatgaagcctgtgcagcttgctgtctcacatgcgacacggctcatcgggtcctgttccatacatgcatcaaggatggcgtctgatactgcatcgcagagcttatctggatgtccctcagttactgattctgatgtaaataataatttctccattagttttcggttactcctttcctgttatgtcaccaattttccaataaaaaaaccacttactgcaaataagtggattaaaattaagataataaaaatcctcttattgttcgattactcgctcaggttggcaccttcctgttttctaacggggttgccgtgatttcatagatcctttgtatctccatcactctgaataagagaagttacaatatagaatttttcaaatctctgtcagctatgttactaccacatgatatatatgtcaagtatcattttcgatacagctttatcaataatccattttcgataccctattcatttttataatcaaaagggttacggagtagttactcaaaaaaattataaaataaccaaaaataagaaccgtacatctacagtaagatgctgccggttcttattttatatatacctatctattacgataccttgagtatgaacttctgaagctccttctcatcctctaccctggcaatctttgcacctatctttgtaagcttctcctcgagtgcctcatagcctctctggatatagtagatatcatcaaccactgtaatgccatctgctgcaagacctgctataaccagtgcagctcctgctcttaggtcaggtgcattcactctggcacctgtgtatcttttcacgccgctgatgattgctatattgctctctacctttatatcagctcccattctggtgagctcgtcaacatacttgaaacgattctcaaatatgctctctgtcactgtactggtgccctcagcgatacccaaaagcactgccatctgtggctgcatatctgtcgggaagcccggatatggaagtgttgtgacctgtgtatgctttaaatgtccgtctgatattactctgactgagtcatcaaactcctctacctggcagcctacctccaacagctttgctgtggtggcctcaagatgctttggaatgacatcctttaccagcacgttgcctcctgttgccgcaactgcaaacatgaatgtaccagcctcaatctgatccggaatgacagaatactctgtcgcatgtaatttctccacacctacaattctgatgacatcggttcctgcgcccctgatatttgctcccatgctgtttaagaagtttgccacgtcaacgacatgaggctccttagccgcattctcgataacagtcttgccatctgccatggctgcagccatcataatattgattgtggcacctacagaaaccttatccatatatatgtgtgtgcccttaagctcctttgccctggcgatgacaaggccatgagctatgtctatgtctgctcccatggagcggaagcccttcatatgaaggtcaatcggcctgcttccgatatcacagcctcccggaagcgcaacctctgcatgcttgtattttccaagtaatgcaccaatcaaataatatgatgccctgattcgtctgatgaattcattatcgacatttacgcccctgataaatgaaccgtttatctttaccttgtgtatatccacgcgctccacatgtgcgccgatttcttcgattgcctgaagtaagacattgatatcccttacatttggcaaattatctattgttacagtctcgtctgtcattatggcagcggccaaaatagcaagtgcagcatttttagctccaccaatttcaacttcaccgtataaaggatttccacctttgattacgtactgttccatattccacctctatgaattcaggagtatacttcctcctaatatactattctcaatttacactattgttatacatccaactacaaatttcatttatgacgacgtatttaagccgccatttgtgctggtgctgcttttaataaatgacgcagcagctactattatctaatcatatcacgataaataagcactataattcaagtgcctccaccagcttctctactgtctgctccacatcaagcccctcctcggaaacctcgatgtctgcatactgctcatacaattttgagcgctcttcaaaaagggtctctaaagtctgccctttctttaatactacacctctaccctttatatctgcaagtcgtttttccaaaatagcataagaaaccttgagatacacaactctgcctatctccttaagatgctccatggcctcttttccgtataccaccgaaccgcctgtagctataatggccctatcagccctgatagaggcattgacacggttctctacctctataaaaccgtccgtgcccttttcctcaattatctcacgcagaagctttccctcctgctcctgtatcagtaaatccgcatccaagaaactgtatcccagcacctttgcaagtattacgcctatggtactctttccaactcccggcatgcctataagtacgatattagttttctgttccatctactgcctcagtattctctgtatctgtactattggtgctttctgactgctgtgtgctctctgtagcgcttgtgtctgctgcctttttgtccttcttggtagtagtaaaataattgtgaatcttgatcttgtcaagctgcttctgctttacagaccatttttcatcgtcctgccatcctgaaaggatgccattgtaatatttgtcctctttattgccctttacggtttttctgtttgactctgttgcttcctcatcggtctttttgtcaagccttacgatatagtaagtgctgtctgtagtgatgaggtctgaggtctgtccctcctcgagggaattgagtgcatctacaacgctctgatcaagattgtttgtagtatatacactgtccttagtcttgctgttcgatgactctgagctctctttagactcggtatcgcttatagactcggtggactctgtgtcatctgatttcttatctgaatcatctgtcttctccgcatccggatcaatgtatgtggcgtatgtgcctgttgtggctgtagtgcctgctgccttggccgcatcctctaaggatgatccacctgcaagcgcctctaccactgcatctgcctgtgcctttatctgtgctgactgctcatctgtatatgtctgatactggtaattagagtcatatgcacccttgtaatcaagcttcacaatggtgtatgcagccatattggcttcctcatccgtcacgcttgaatcagcatttttgatgattgcagcatacatcttactctttataaggcgaagctctaaatattcctcgacaatctcctctgtagcactcatctcgtctatcacatcatcggaatttgccttcataaacttctctgcggcctttttgatttcctttttctcatcatcagaaacctctacatcgtaatctgactgatgcgcctttaatgtgtaaagctcatgagcctcctcgatagcatttttcttccatgtttcaagcacagtattattgcctgatactgtcttgtcccagtagccctcgcccatgtactgtatatacatgtcatcataaccggcctcctggtaccttatcataaaattaacaagcccaagcttgatatcctctttatctaatgtcgcaactgttgcggttttatttattgcacatcctgtaaaagctgtaaccgagagtgttgcagctaataacatagctattacttttttcgctttcattgtatctatcctctttaaaattggtatagtatcgctcgtatattatagagcttttcgggcctgctggcaagcattttctaaactttgtaaattatcgtcaatttcgcgtaaaacatgtggtgtttcctatgctatatgctacatgattccaaaattcgggtaactattcagccgtaatcagttccttacgcatttgcgaaatcagttcctccaccacatcaagcacatcccgcttctttgccacgctgccattttttaaatcaaatgtgaaatatgggttttctgccatattgaatttgagtgaggatttatactgggcaataagctccggtatcttctccgcatttatctttgcccgttcaaacatggtaagctttatcagtgagccggtctgctttatctcagtgatatatacggcatgtgccaatgccttaagccttgccacgcgaagcaggctgagcactgattttggtggttcgccaaacctgtctataagctcctcgagcatctcgtccttctcttcctctgtctctatgcctgcaatacgcttgtatatatccagcttctggaattcgtttgcaatataacctgccggaatataagcatcggtaacaatatccacgatcgtatcaaatttatcactgatatcctcgatgccctttgcctcttttacagcctcgctcaacatcttgcagtacaaatcgtagcccactgcctccatgtgtccgctctgctccgcaccgagcagattgcccgcaccgcggatttcaaggtctctcatggcaatcttaaagccgctgccaaggtctgagtactcctttatcgctgcaagacgcttttctgccacctcttttaacatcttgttgcgcctgtacatgagaaatgcatacgcagtacggttagatctgccgactcgtccgcggagctgataaagctgtgaaagtcccatgttgtccgcatcgtgtataatcattgtattgacgtttgagatgtcaagtccggtctcaataatggtcgtggatacaagcacatctatttcaccatttatgaaacggtacatgatgcgctcaagctccgtctccttcatctgtccgtgtgcaaatgcaacagtcgcatccggcaccagctcctgtagctttgccgctacttctgctatgtcgcgcactttattgtatacgtagtacacctgtccgtttctggcaagctccctgttaattgcctctctgacaagctcatcattgtattccatgacatatgtctgaatcggcacacggtccatcggcggctcctcaagcacgctcatatcccttatgccgattaagctcatgtggagtgtcctcggaatcggtgtagcagtcagtgtgagcacatcgacattgaccttcatctgcttaatcttctccttgtgagtcactccgaagcgctgctcctcatcgattaccaaaagccccagatccttaaactgcacatcctttgagagtatacggtgtgttccgatgatgatatcaacctcaccctttttaagcttttctatcgtctttttctgctctgccgcgcttctgaaacggcacatcaaatccacattcaccggaaaatccttcatcctctgcgaaaacgtatcgtaaatctgctgtgccagaatggttgtcggggcaagatacgctacctgcttgctgtcctgcactgccttaaaggccgcacggattgcaacctccgtcttgccgtagcccacgtcaccgcaaatcagtctgtccattattttatggctctgcatatcagtctttgtggcttcaattgcaagaatctgatcctcagtctcatcaaaagggaaaagctcctcaaactctctctgccataccgtatcctcgccgaaggcatatccgttttgctgctcacgctgggcatacagcttcaccaggtctcctgcaatctgctttaccgcacctctgacacgattcttagtcctggtccattcctgaccgccaagcttgttgagctttggttttctggcatcctttccggcatatttttgtatcatatcaagctgggtagcgaggatatagagattggagccaccctgatactctatcttgatgtagtcctttacctttttgtccacctcaagcttttcaatgccgcggtaaatacctagtccgtggttttcatgcactacataatccccaaccgacagatcggtaaagctctgtattttttcaccctcataggtgcggtgacgcttctttttcttttgctgcgccccaaaaatatctgactccgtaatcacggcaaactttaggataggatactcaaaacctcttctcaccttgccgtagcagaccataatctgcccctcaaaaagctcatggtcgtagttttcagtgtaaaagcatgtgattccctgatctgtgatatcctctgaaagccgctttgccctcgtccttgaaccggataaaagaatgactctgtagccgtttttcttatagcgctttaagtcctttatcaaaagctcaaagctgttgttgtatgggctgacgctctgacagtgaataccatagcttcccagctggtgcagtccgtttgctttattatcaagcgcagcgagtgcgatgcacgaatacttcccgagctttgccacaatctccttctctgtaaaaagaccgttcatctgccccggaagtatatatcccatcgcaagtctctgcttcatgctctctgaaaactcggtctctgtaagctttccctgctctgcgcatctggtcagctcatcgaagaatataaggctgtccgatggcttaaaataatccaaaagcccgactctctcgtcaaaaaagtacgacaaaaaagcatccatgcccgcatacatggacagctctccccactcctcggtaagctcgtctgccatcacagtcactctgtgtgcttcctctgtcttcatctgctttctaagcttgtcagccacacgctttgcctctgccttaagcttgtcaattcccccggccttttcctcatcactaagtacaagctctgccgccggatatatgctcacccggtctgtattttcgatggatttctggctctcgcagtcaaaatatctgatagtgtctatctcgtctccccacagctcgattcggataggattctcctccgtcaacggaaaaacatcaagaataccgcccctgacagaaaactgtcccatcgtctggacctgatactctttttcatagcccattctgataagagcagcctgaatttccttcaaatccaaaagctgtccctgctcaagtgtaagcacgttttcccacatcttttctatcggcgccattgtattcatcagcgcatcaaaggtggtcacaagtgtcactctctcctgctcacggatagccttcaaagccctgatgcgctccgctgtcaggagattgcccctgatatccgactggtaaaaaagcacatcctttgatggataatacaccacctctttgtcaaaaaaactgtactcatcgtacagttccttcgccttctgctctccaaaggtcacaataagcttgtttttcctgtgacctccaaaggcatatatcatctgtgatttttgcgcatctatgcatcccgtgacagatataagtccggacgatttttctgccgtttttgtcatctcctcaaagcccgcaagggaaaggagtggctctgtaaatgctttcactttcaattctccatttctgtctgttcaaaatcaccttgtcgatttccagctagttatatatgttcatagccttatccgtctcaccatgcatcataagaactgctgcatccatcgcatgacctatagcttcctctacctttgccctgtcctcagaactgaaacgcccgagcacatggtcagcaagatcccagccctgcggcttctctccaacaccgaccttgatacggctgaagccctgtgtgccggtcattgcaatgatactcttaatcccgttgtgaccgccggcgctgccctttttgcggatacggatacgccccggctcgagcgaaatatcatcaaaaataacaatcatttcctcatccggatcaagcttataaaaattcatcacctcagcaacagactcgccgcttaggttcatgtaggtctgcggcttcacaagcagcaccttcatgccatcaatcactccgcttccacagagcgccttgtgctttttgtctgtcacacttatattatatttatccgcaagcgcatctatcacatcaaatccgatattgtgtcttgtgtgctcatattttttgtcaggatttccaagtcctactataacgtacatcttttatcctttctctttctcatatcatttacaattcaaaataaaacaaatactgctggataattcccgccacacccttgtagcgctcaaaatcaaagccgtcactataatatttgtccaaaagctgctttacatgcgtatctatcggaaacgcatccacatgatgcaaaccaaaaagacatatgcagttcgccacctttttgccaattcctttgcgagaaagcaggctttccatcgcctcatcatagctcattttgcgcagattatcaagccagtcaggattattagcaccatactcatatatttccttcagatacggtgccctatagccaaagcccatgctcctgtcatcaaatacctcatccggtacctcaagaggctttggaaatgtatacagttcttccccctctgcactgccgtctattttatgcccgcaccgcctgcaaagtaaatccacactgtttgtgattcgctttatgttattattctgggaaatcataaaagtaacaatcatctcccacaaatcctgccttaaaatgcgcacaccactgccatatgcatacgcctccttcagatgcgcatcatctccgtctgctatcagctttgcaatccccgcataatccgtatccatatccagataacttttccatatattgttccagtcagcctcatcacagtccagctcaaactcattcccgtcctgtttaatccgaagtgccctgtcaaatgccactaccgtgtattcgttttctcctgtgttcttccatctgaagcactgaccactgtcagcaatctgttttaaatccagattatctattttcgtcttgtacatatctgtttgtctatcctctttcattgtagctatactcgtaactattcagaaccatcccacgcacattctaaaaagccggtctgtctgtggcttattgtaccacggatagaccggtttgtgtgaaatatatttggattattataccagctcaggaattttatatcccgccttgctcatcgctttttcaaagttattgtttgattttatgcattctcaatctctgtcttatacttttcaagaatcatattctggatcttctcgcgtgtggcagagttaatcggatgggctatatccctgtactcgccatcgtttgccttacggcttggcatggcgatgaaaagttccttttctccttcgattaccttgatgtcatgtaccacgaattcatcatcgattgtaattgacacaaccgccttcatcttgccttccttttctaccttacgaattctgatgtctgtaatctgcatatttttgtccccctggtctgtttttaaattacatatcttacatttttttcttttactattctgactccatcctcaccacagtagtatgtgtttggactgatggttccgcgactctctacgatgcaattctcaaggtgcacattgtcgtctatgtagacatcattgagtatcacgcagttcttcactgtggtgtttttgcccacaaatacctgcttgaaaagcaccgaatcctccactctgccgtttatgatacaaccacttgatacgaggctgtttgaaatgtctgatcccggattaaacttggccggtggcaggtcgtccacctttgaacagattgtcggctcctccctgaagaaatagcttctgacgtcaggtcttaagaaatccatattggtcttgaagtatgcatcaatatcggcgatattgttccaatatgaatttatcttgtagccatatattttctttacatttttgtagcgcacgaggatatcatttacgaaatcgaatctgttttcctcagctgctgcctccaaaagctctatgagctgtcgtcttctgatgacatagatacctgtggaaatggtattggatgaagcctcgattggcttttcatcaaactctgtgattcttgactcctcatccatgcgtaccacaccaaaacggctgacatcgtcgttgtacatcatgtccttgcataccactgtaatgtctgattttttctcgatgtgaaaatcaagcactctgttgaaatccagcttgtatacacagtcaccgctgctgatgatgacatatggctcatggcgtctcttgagaaaatcaatattctgatacatcgcatctgccgtacccctgtaccagtcactgttgtccgctgtgactgtaggtgtaaagaggaataatcctccctgctttctgccaaaattccaccattttgatgagcttaaatgctcattcagtgagcgtgcattatattgtgtcaatatcgcaactgtctgtatatgtgagtttgacatgctgctgagtgaaaaatctatagccctgaagctgcctgctaccggcagggccggtactgctcgttttgctgtcagttccttcatcctattattgttgccgccggccaaaattattcctattgccttcattttccgtcacctgccttgataataacttctccgccctcaagcacaccgtctttgtaatcctcttcgtatgtaacaccggagattgctgtatttttgcctatctttaccccgtccggtatcacagaatcttctcctatagtgacaagcccaaatgagtatatgctctcatttaatacgttcggcttctcctgtccgaagccaagtgtcacattgtcgcccaccttgcaattttcggcaataatggacttgtctatcgtgacattggagcctatctccgtgtcacgcatgatgatggaatcacgtattactgcgcctcttccaatcttgacgttggcacctataacagaatgttccacatgaccatagcattcacagccctcacccatgatgcttcgctccacatgacctcctttggctatataaagtggctcgattgcatcgttccttgtgtaaatcttccaatactcctcgtacaggttgaactccggaatgatgtccacaagctccatattggcctcccagtatgagcccagtgtacctacgtccttccagtatccgttgaactcgtatgcaaacatacgtctgtcgttttcaaagcagtatggtatgacatgcttgccaaaatcacagttttcctgattctttagtgcaagtaaggcttcctttagcaccggccatgagaatatgtaaatgcccattgatgcaagattgctgcgcggatgaaccggcttttcctcaaatgcattgatgcgcttatcatcatcggctatgacgataccaaatcggctggcctcctcgataggcaccggcattgttgctatggtcacatctgcattgttttccttgtggaaatcaagcatcacctcatagtccatcttgtaaatatggtctcctgacagtatcaacacatagtccgggttgtaactgtctatatacctcatattctggtagattgcattggctgtacctgtgtaccactcgctgttgccgctcttctcataaggaggcagtattgccactcctccgttattcctgtcgaggtcccacggaatacctattcctatgtggctgttaagtctgagtggctgatactgtgtaagtaccccaactgtatcaatgcctgaattgatgcagttgctaagcggaaaatctatgattctgtactttccaccaaacgaaactgccggttttgctacgtccgctgtcagaacaccaagtctgctgccttgaccgcctgctaaaagcatggctatcatttctttcttaatcacgttatcactcctcgtctgtcctaatttttgttgtgcccatccggtacccaccactagtttctgtaataaccgtatctgtaatgcttctataataaatcacaattgtttccatataaattatagttgccgctgcataaattgcagttactgccatatactttaaacccatcaaattcatatggtccggatgaattatttttataaaaaaaattataccacagccgcattatcacttcaacatttttcacaaaatcaaataatatttttctttttttttgacattttgcacaagtgtcatttatcgtatatctgtttaacctgcaagggttcttatcatttgaaagtcatgcctgctttcaccttatttttcctttgcaaatactgtatttagttgtataattaatataaagtaactattcagaacaagaaaatcagtcgcttacatgcaatcatgacgcatcggctttttgttctcagcagttcttaatagttacaatataaattataataaatcaggcaggtaaaataaatgtataaaatagatttcagcaaaccaatacacatccatttcataggcatcggcggtatcagcatgagcggtctcgcagagattctgcatgaggagggctttaccatttccggctccgattcaaaggaatcagacctcacaaaaactcttgctgccaagggcataaaagtcatatatggtcagagcgcagacaatatcacctcagatatcgacctggtggtttacactgctgctatccacgaaagcaatcctgagtttgccgcagcaaaagcagccggtattccaatgcttaccagagccgagcttctcggacagattatggacaattacgattattctatcgctgtagccggcacacacggcaagactaccaccacatccatgatcagtgagattcttctcgccgctcagacagatcctaccatttccgtaggaggtattttgtcatctatccacggcaatctgcgtgtgggcgattcagagtacttcatctctgaggcgtgtgagtacacaaacagctttttgaatttcagaccacgctacagtattattttaaatattgaggctgagcatctggatttcttcaaggatatcaacgacatcaggcattccttccgcgagtatgcatcaaacactctcgcaggcggtgctaccatcatcaacggtgagattgaccgctatgaagagattgtcgcaggtcttcctcagaagattatcacctatggctttgattcaaaatatgatttctatccggaaaatataacctatgacgataaagcttgtgcatcttttacagctatgagacagggtagtccacttttcgacgtaaaactctctgttccgggcgctcacaatgtaagcaatgcgctcgcagccatagctttatccaccacactcggtcttgatgaggagtctatcctcacaggcctcgacaaatttggcggtgctgacagacgtttccagtacaagggcaaggtaaacggcgtcacaatcattgatgactacgctcaccatccaacagagatccgtgcaacactgacagctgcacaaaaatatccacatgacaggcttgtcctttgcttccagccacatacctattccagaaccaaggcattcttaaatgattttgccgatgttctttcaatggcagatgttgtggtgctagctgatatctatgctgctcgtgagcagaacacctatggcatttcatctaaggacatccttgatttattgctcgaaaaaggtgtgaatgcgcactatttcccatcatttgaggaaatcgagaaatttttatcagaaaattgtgtaaacggcgacctgttgataacaatgggtgccggaaatgtagtagaaatcggcgaagacctgcttaagaaataagttatccacgttatccacatacaaaatgttaacaactctcattttgtgtgtggattttttaaataattttcaacagcttatataccctgtgatacattgatttttcaattattttacatagttatccacattatccacatttttttgtggattcagaaagcccgaatttacaaggcttgtagcacttttaccatcttcacacggttaaaatattgtgctataattgctcacaggttaagcgaaagagagttttttatatgacagcgataaacattagcagtgacatagcaacatcattcactactgtgtcagatatttttatagatcaatacatgccaaaggcaaacggtgagtttgtcaaggtatacctttatctgctccgtgcgacaggctccggggcaggcatagcaactatttcagagattgccgatcatttcagcaatactgaggccgacatcatacgtgctctcaattactgggcttctgagggcattttacagctgcaatccggcgctgatggccagattatgggaatcaacctctgcagtctttctgtatccggtatgcaggctgctcagagtaatatacaaagcgctgtggctgataatgccgcgcagaataatttgcaaaacagcgtggttaataatactacacagaataatttgcaaaacggcgtggttaataatgctgcacagaatatttctaccgcagatattcggatgcaggattctgttgtggaaaagcttaagagccagactcctgacaagcctgcttcttcacagaaggaatacacacttgatgagattaaggagtttagaaagaatcctgacatttcagagcttttctttattatagagacatatctgaagcatacgctctcatccacagacaccaatattgtgctctactggctggacgagcttcatttttctaccgacctggtggagtatctcgtagagtactgcattactaagggacattcaagccttcgttacatgaacaaggtcgctctcggctgggccgatgccggcataaagaccgtagatcaggcaaaggacgatgcagccgctcactcacagatttactattctgtaatgaaggctctaggcatcacaggccgcaatctggttgactctgaggtgtcactcatcaacaaatgggtcggcgaatacggtttcgatatagagcttgtaaaggccgcctgtagtaaaactatttcagctatccagaagccaagcttcgagtacacagactcgatactcgcgaactggaggaaaaaggatgtacatacattaaaggatgttgaagtgcttgatgccaactttgccaaggccaataaggcctctgctaccggctcatcacagagtacaaatgctgcaaacggttcctcaaaaccaaaaagcaataattcaagttccaagaataaatttaacaacttcaatcagcgcaacaatgattacgacaagctggagaagctgtttctcaattctacggtatgatttaagctacatgatttcaattatatgatttaaactgtatgatttctgttgcgtgatttcaattatataatttaacttgtatgatttctgttgcgcaatttcgttgtatgatttttcaagttagatttacacatcccaaggagggtatatggcacttaccaatgctcaatatgatgagataatgcgaggctacgataaacgccagcttcagaacaaatacatacatgacaagcgtattgaggaagcctatcgcaaggcgccccgcctcagggagattgactcagagattgcatccgcatctgtcaggcaggcgtacaggcttatggacggcgatgagaatgctcttgccgctttacgccttgcaatcgatgactataaggaggagcgtgctgcactgctatccacactcggatatccgcttgattattttgagcctatttacacctgtccagattgccacgatacaggatacataaacggtcagaaatgtcattgtttcaagcaggctattatcaataccgtttattcgcagtccaatatcagggagattttgtctcgtgagaatttttccacgctctcatttgattattactcagatgagcagaaaaatcctgctacagggctgtctgcgctcgccacagcaaagcttgccgtgacgaactgtcatgattttatagataattttgaaaacaaacctaaaaacatatttttctacggtaataccggtgtcggaaagacttttttatctaattgcattgcaaaagagcttttagatgcaggttactccgtaatttactttacagcattccaattatttgatatattaagcaaaggtgtgtttgaaaaggatgcagatgccatcgcagcgcaccagaatatattcgactgtgatttacttatcatagacgatctcggaaccgagctttccaactcatttaccacatcacagcttttcctttgtgtaaatgagcgtatactgcgccggaaatctactattatttccactaatctgaatttggagcagatagcagagatttactccgagagaacactttcaagaatttcaagcaattatagttttatcaagctctttggagatgacatacgaattaaaaagcgtctttccaaataacgctttttatattatatatttagtttatttattatatggttatatggaggaataacaatgccaaacgatgagagaattttggagactatgccaaccggtacacttggacttgttgcaaccgacagttgtataggtcttgcccagaaggtagatgcatacttacagggctggagagagcacagagagcaccagcatgctaacgagagtgctttcaaggactactacaaaaacagctacattatcaagccttctacacctagattcggttctggcgaggctaaatgtgttatcaaccagtctgttcgtggttatgatctgtacatcatggtagatgtaactaactacagtcttacctacacagtatgcggtcagacaaaccacatgtcacctgatgaccactatgctgacttaaagcgtgttatcgctgcagccggcggaaaagcaagaagaataacagttatcatgcctttcctttatgagagccgtcagcacagacgtacaggccgtgagtctcttgactgtccattggctcttcaggagcttatcaacatgggtgtagacaatatcatcaccttcgatgctcatgaccctcgtgtggtaaatgctattcctctgaatggttttgagaatgtaatgccttcttaccagttcatcaagggtatcttaaagaacgtaaaggatatcactattgatgctgaccatcttatgattatctctcctgatgagggcgctacaaaccgtgctatttaccttgcaaacgtactcggagtagacatgggtatgttctacaaacgtcgtgattacagccgtatcgttgacggacgtaaccctatcgttgctcatgagttcctcggaacaaatgtggagggtaaggatgttcttatcatcgatgatatgatttcttccggcgagagtatgatagatacagcaagagagctcaagaagcgtaaagctaacagaatctttgttgtttctacattcggtctcttcacaaacggctttgcttcatttgacaaggcttacgaggagggtctcatctacagagtagttacaacaaaccttatctaccagtcaccggagcttctctctaaggagtactatatcagctgtgacatgagcaaatacatcgcatacctcattgatacattaaaccacgactgttctatcagtgatcttctctcaccatatgacagaatcaagaagtgtgttcagaagtacaatgacgagcaggctgcagcaaagaataaataattaatcgtatttaaaaaaagctgtgtgaaattaatatgtaccccttttactggatatccagtgaaaggggtatttttatgcgttacagttacgaattcaaaccaaaggcagtcgaactatacatgcaaataagacgcatcagtttttctcaaagtttagaataattatcttagtaatataaaaaaccagagaagtgagtgtcatccactcaaatctctggttttatttagtctaagatttataccgattaaatattaaactaactcaaggagaacctctaaagctccgtcacctttacgctgtccaatcttaacgattcttgtgtaaccaccgttacgatcagcatacttaggagcgatctcatcgaataacttgtttgttacatcgatagtctttgttcccttctttgtgccgtcagactctttagctgtgtaaagaaccttgagcatctgtcttctggcatgaagacgtgaagcagaatccttcttgatcttcttctctacttcgtcataaacagtaactttctttccgtctacaacctcttttactctcttgccatctttgtccttgcgggcaaccttagctgttacagtaacctcttcgaagttgtctttctcttttactgctaatgcgataagaccctcagcgatcttacgaacctctttagccttagcctctgtagtaacgatctttccgttaacaagaagctgtgtaacctgacctctgagtaaagcctttctctggcttgatgttctgcttaacttacgatattttgccattttaatttcctccatttgtgggacatccggtcacgctcatcggtcttactgccagacatcgtatcttgttgtgataaagcattgccttatttcaaaaagcaaatgctcaaatcagttgccactcatgtatcagacacggtcacgctctttggtcttactgaccctgccgctatgagttttgtcacacataaacataaatatgatatttaaaatttatatatgaacaatttatttagatgaatcagtgcaaggattattcgaatgaattattcctcagtctgatttaactctaaacctaattcttttaattttgctaaaacttcctctaaagacttgcgaccaaggttacgaaccttcatcatgtcctcaggtgttctattgataagctctgcaacagtgttgattcctgcacgcttcaagcagttgtatgaacgaactgaaagctcaagctcatcgatgttcatctcaagaaccttttcctgagcatcgttttccttctcgaccataacgtcaacctgctgtgctgcctctgaaagatcgatgaacagatttaagtgctcacttaataccttagctgcaagactgactgcctcgtcaggctccaatgcaccatttgtaaatacatctaatgtaagcttatcataatctgtaacctgacctacacgggtattctctacagtaaggttaacacgctcaacaggagtgtagattgaatctacagcaagaactccgattggtgtatcctcgttcttgttcttctctgctccgacataacctctgccgtttgtgattgtaagctccatgtaaagcttagaatctgcaccaccattcaagtgtgcaatctctaactcaggattcaaaatctcgatatctgaatcaacctgaatatcggctgctgtaacaacgccttcaccttcgaattcgatatatgcaacctttggttcatttgtagaactattattgcgaattgcaacgttcttgatattcatgatgatttctgtaacatcttccttaacaccaggaatagagctgaattcatgtaaaacaccatcaatcttgacctggcttactgcagcgcccggtaaagaagaaagcatgatacgtcttaaagagtttccaagtgttgtaccgtaacctctctctaatggctctacaacaaatctgccatatgtcttgtcttctgaaatttctgcgatttcaatttttggtttttcaaaatcgaacacttcaaattccctccttctcgggtatcgttgttatatgttatcaaagagtggataagccgggaaataaatccccggcaaatcaacctaattttacttagaatataactcgacgatgagcatctcatctacaggaacatcaatctgctcacgtgtaggtaagtcttttacagttccctgtaatttctcagcatctacgtctaaccactccggaacgattcttccgccagctacctcgacgatatctttcattctctgagtattctttttgctctctttaatttcgataacatcgccagcctttacaaggtatgaagggatgttaacaacttttccgtttactgtaacgaacttgtgatcaacgatctgtctagcttcttttcttgttcttgcgaaaccaagacggaagattacgttgtcaagtcttgactcaaggattgtcataaggttaagacctgttaatcctttcatctgatctgctttcttgtagtagttacggaaaggcttctctaaaacaccatagatgaatttagctttctgcttttctcttaactgaagtccgtactcagacacctttctgtttgctcttgtaaggtttcttctagacttcttatcatatcctaaataacttggctctaaaccaagtgatctgcatctcttaagtacaggtactttattaactgccattttaatctatacctcctgattagactcttctacgttttggtggacgacatccattgtgaggtaccggagtaacgtctctgattgatgtaacctcaagaccacatgctgaaagggcacggatagctgcctctcttcctgaacctggtcccttaacgaatacgtcaactgtctttaatccatggattaaagctgcctttgtagctgtttctgctgccatctgtgcagcatatggagtagatttctttgaacctctaaatccaagaccaccggcacttgcccatgataaagcatttccttcagcatctgttaaagtaacgattgtgttattgaaagatgcctgaatatgtgcctgtccgcgttcaacgtttttctttacacgctttttagttgttttctttgcaacattcttagccatatttaaactaacctactttctactttctaaactttatttaagttataatgaagctctgcttcttcgtccgcagaaccaaacgcgcactacgttcaagtggcgttttcacttattatctaagtgattatttcttcttgtttgctactgttctcttaggacccttgcgagttcttgcgttagtctttgtcttctgaccacgaaccggaagtccctttctatgacggataccacgatagcatccaatttcctgaagtctcttaatatttaaagcgatttctcttcttaaatcaccttcaactgtcattgtctcgtcgataacagcgctgattctcttaacctcgtcatctgtaagatctctaacacgagtgcttggatcaacattagctgcttcaaggatacggtctgcacttactcttccgattccgtagatgtaagttaagccgatttctacacgtttttctcttggtaaatctacacctgcaatacgagccatgtgtgtttacacctccataatttttagttatttactatagtaacgatacatctgcaacttgatgtatgctctccgaaacacatatgcatctacagctacggttgcacgtcctgaaatgtgtgtagccatatgcgttcccatatttgcattttgttccatatcactcggtattataatatgaaaccagaatgcctctgtttattatgaacagcgatgataaatatctcgctgcagccgcacataatgatgtgaaaaaaggtttaataaaccaaacgcacaaataacagggtcaaatatttgtactaattaaccctgtctctgcttatgctttggattctcacagataattctgatgcttccttttctcttgataactttgcacttttcgcaaataggtttaactgatgatcttaccttcacagcaaatcctcctttctctataaaagtccttttcaggtacttttccaaaagtgtccagatagcattatacacggacacttaagggaagtcaatatattttttaaaaaaattatctgtaaaaattacttatctctccagataattctgccctttgtcaggtcgtatggtgacatctcaattgttaccttatctcccggtaaaattctgatgaaattcatacgaagctttccactgattgtagctaaaatctggtgtccgttctcaagctctaccttaaaaaacgcatttggtaacttctcaactacaacaccttcaacttcgataacgtctgcttttgacattttgattcctcctgtaaataaatccttgggtttcgttatgattattattagattagctccagaaatccggctgctttttcatcctctgtcagagaaagtatctccggctttccttttgtaataagtatggtattttcatagtgtgccgacaacgataaatcctcagtaaccactgtccattcgtcatccatccacaccacatgcggtgaacctgcattaatcattggctcaaccgccagtgtcatgcccggcttaagtctgagcccttttctaaagccctgtggtctgaagttcggcacctcaggatcctcatgtaaatggcttcctatgccatgaccaacaagatcatatacaactccgtatccaaacgactcggcaagctgctgtatggctcctgaaatatcatacagtctgtttcccgcaactgcattctttattcctgcaaaaaaactgagacgtgttctttctataagaagtcttgcttcctctgaaatctctcctacgcctactgttctggctgcgtctgagtggtatcctttgtagataacaccagcatcaaggctcacgatatcgccctcctgtaagatacgctcatcagtcgggataccatgcacaacctcctcgtttactgaaacacatatggaggccggatatccgcaatatcctaagaaagacggctcgcatccataactacgaatcatttcttcgcccagccggtccacatccttagtggacattcccggtttgatttctttaccgagctgctgatgaacggccgccagaatcctgccggcctccctcatcagctctatctcatgttctgatttgatagttacagacattattattcacctaaaatacctacaatggctgaaaatacttcatccataggctttgttccgtctacagactttaaaataccctgcttgtcataatactcgataagcggctgtgtctgctcatgatatacagctaagcgcttctgaactgtctcaggcttatcgtcatctctgagtactgtgtcagcgccacatgcatcacatttgccctcaacctttgttggattgaaaacgatatgatatgttgcaccacaattgaggcaggctcttcttccacccatacggttaacaatgttctcatcaggaacatctacatcgatggcataatccatcttctccccaatctttgtgagagcatcatcaagcgcctttgcctgtggaattgttcttgggaaaccgtctaatacaaatccgtttttgcaatcatcctgctgtattctatccataacaaggtcacaggtaagctcatccggaacaagtgctccctgatccatataagtctttgccttcttaccaagctctgttccgttcttgatgtttgcacggaatatatctcctgtagagatatgtggtatagaatattttgcagctatctgttttgcctgtgtacctttaccggcaccaggtgcccctaacatgatgatcttcataaaaattttctccttttatacaaaacttgttgatagcacgaatggagatactgaattcagtatctccaatgtacaattaatcatctaaaaatcctttatagtatcgaactctcatctgtgattcaatttgcttcaatgtctcaataacaactccgacaatgatgatgattgaagttccaccaaaggatacatctgcgttgaatactccattgaagaatatcggaacaaatgcgataaacgcaagtccaatagctccaataaatacaatgtagtttaatatctgatttaagtaatcgctggttggctttccaggtctgataccgggtataaagccacctgaacgcttcatattgtttgcaatctcaagcggattgaatgtaatgtttgtgtagaagtaagcaaatgctatgatcaacacaatgtaaacaataagtccgattgaatataccggctcctttggatcacaccagttagactgtgataatccttttaatatcttagagcctattccatttccattgccctttccaaggaagctggcaatgataacaggtgtctgcataagagactgtgcaaagattaccgggataactccactggtatttacctttagtggaatgcatgtctgctgaccgcccatctgcttgttgcctcttattttgcttgagtactgtacaggaatcttgcgctgtgcatcctgaagcaatactacaaatactaccattgcagcaattattgctactacgataaggcctgcaacaatcgcctttggaacgttcgctgctgaagcaatgaactgtgaccaaagtgtacttaaatcctctggaatacgtgaaataatattgattgtcaatactattgatattccgtttcctacacccttttctgtaatacgctctccaatccacataagtacagctgaacctgctgtaagtgaagtaacgaccataataacagtcaatggtgtcttttctgtaaggtaattctgtctataaaaaccaattaccatcatgactgactcaagaaggcctaatccaattgtaagataacgtgttatctcaacaattttctttctgccatcctcgccatcgcgttgcatctcttcaagcttaggtatagcaattgtaagcaactgcataatgattgaagatgtaatgtatggtgtaatattcagcgcaaatactgacatctgtgagaatgatccacctgttatagcatcaacaaagcctaaaccatctgctgatttactgtttaaccaactctgaaatacggagcccttgacaccaggaatcggaagctcgcttccgattctgatgacaataagcatcatgaatgtaaaaaggattctattacggacatcctttattttaaacgcattacggagtgttttaagcattagatcacctctgcttttccaccaagagcttcgattttctcttttgcactagcactgaaagcgttagcctgaactgtaagcttcttagtaagttctccatttccaagaatctttacgccatctctaggattcttaacgattccagcctcgattaatgtctcaactgaaactactgcatcgttatcgaatctctcaagagctgaaagatttataggtacgattgtaagagtgtttctattcttgaaacctctcttaggcaatcttctatataatggcatctgtccaccttcgaaaccaggtcttggagctcctgaacgagccttctgtcccttgtgtcccttaccagcagtcttaccgtttcctgagccgtgtccacgacctcttctgaaattatcactatgaactgaaccctcagccgcttttaaattagataaatccatcacggtacctccttattttattcttaaacttcttctacttttacgtatggtgctactttgcgaacagctccctgtgtagctgcattgtttggtaactctacagttttgcctaacttagtaagaccaagagcctcaatagtcttcttgttcttaggaacagcaccgattgtagatttgattaatgtaactttaactctatctgccattttagcgttcctcctaacctaagatttcttctacagatttaccacgaagctttgcaacatcctcagggcttcttaactgcttaagagcctcgatagtagcaagtactacgttctgcttgttgtttgatcctaaagactttgtacggatattctggataccagcgatctcgcatactgaacgtgcaggaccaccagcgatgataccagtaccttcaggagacttctttaataatacggaagcacctgtatattttcctgttacatcatgtgtaatagagttgttctcatctaacttaacatttaccatgctcttgatggcgtcctctttacccttacggatagcttcaggaatttctgctgcttttccaagacctgcacctacatggccgttcttgtcaccaacaacaacgagagctgtgaatcgcatgttacgtccacccttaacaacctttgttacacgcttgatgtcaactacctggtcaactaattctaattgactagcgtcaatgatttcacgtttcatgtttgtctcctcctaaaaatctaagccagcttctcttgctgcttcagctaatgctttaacttttcctgcgtaaataaaaccgcctctatcgaagacaacagttgaaatacctttatctaatgctttctttgcgattacagtaccaagctttgctgctgcatctacgttattagtcttctcgagctctgccttgatatccttgtcaagtgttgatgcagaaacgagtgtatttccaactgtatcatcaataatctgagcatacatatggttattacttctgaatacagctaaacgaggacgctgtgctgtaccagcaagatgattacgcattctgttatgtttctttacacgaacttctgttcttgatttcttactaaccattacttgtccactcctttaattattttttaccagtcttaccaactttacgtctaataacctcatcagcatatttgattcccttgcccttatatggctcaggtcttctcttatctctgatctcagctgcgtactggccaactttttctttatcgatacccttaatgatgatcttgttatcctgaacctctgactcaagtccttccggatcctccatctcaaccggatgagaatatcctaagttaagagtaagtttctttccagccttagaagctctgtaaccaacaccgttaacctcaagagtctttgtataaccctcagttacaccaacaaccatgttgtggataagtgttcttgttaaaccatgtaaggatttcattttcttcaaatcattaggtcttgtaactactacttcttcaccctctaatttgatatccatctctgatggaagagttctctcaagagtaccctttggaccttttacagtcacatgattattttctgcaatttcaactgttactccagcaggaactgcgattggcattcttcctatacgtgacatgcccgtacctcctatattttgatattaggttaatagttatttagtatttctgaccttgtggtcaggttatactttaagatgttacttgctgtatccctactatacatcatggatgcatcgaatatggatacttaataaattatacttaatataaattaagatctttaggggtatgttctcttcgctaagttcgaacaacctacaatcttgcgtcataaggaagttcttttcgcttcactcaaagaacaactttcacactaaattcatgcttggcttacgcttgcattcattaagtgttcaatgtttaccaaacgaatgctaaaacttcgccaccaacctgaagctttctagcctctttatcagttacgataccctggttagttgaaagaatagcgattccaagtccaccaagtactgaaggaatctcatccttgcctgcgtatacacgaagacctggcttagaaattctcttgatgcctgtaataaccttctcgttcttatcagcaccatattttaatgtaacatggattgtcttgatttttccatcctcaacgatgtcgtatttctcgatgaatccctcgtctacaaggattccagcgattgctactttaatcttagaagctgggatgtctactgtatcatgttttgcagtatttgcgttacgaattcttgtaagcatatctgcgattggatcacttgtcatcatcataatgaacgatatcctccttaaatatgtttgttaatatagttatttataaaaacagctgttgctgaaaggaagttctcttcgctaagctcagagaacgccctcgcactaagctcacacagcgcatatgcgcttgtgttcactaagttgctttcaggcttaccagctagcttttttaacgcctgggatctgtcccttgtatgctaactcacggaagcatactctgcagattccgtatttctttaaaactgaatgtggacgtccacaaattctacaacgtgtataagctcttgtagagaactttggtgcacgctgctgtttgattttcatacttgtcttagccattagaattcctccgattatttagcgaatggcatattgaactgtgccagtaactcacgtgcctcttcgtctgtcttagcagtagtaacgaagataatgtccataccacgaaccttatctaccttatcatactcgatctcagggaagatgatctgctctttaattccaagggcatagtttccacggccatcaaatgcgttagggttaacacctctgaagtcacgtacacgaggtaatgctaagttgatgagacgatctgcaaactcgtacatcttctcaccacgtaatgtaaccttacatccgattggcattccttctctgattttaaagttagctatagcattctttgctttagttgtaactgctttctgtcctgtgatggcttccatatccttaacggctgcctcaagaaccttagcgttttccttagcttcaccaacacccatgttaactacgatcttgtcaagctttggaatttccattgcgtttttgtatccgaactttttgatcattgcgtccttgatctcattttcgtactgttctctaagtctactcaatgtcttaatcctcctctctccaattagtcgataactttgcctgttgatttagcaaagcgaactttcttgtctccatccatcttgaatcctacacgagtaggctttccgtcatggatgagcattacgttggaagcatcaattggagcctcctgatgaacgataccgccctgctgatttgacatacttggttttgtatgcttagtaaccatgttgattccctcaacaagaagtgtattgttctttgcgtttacggcaattaccttgccctcattgttgatatcttttccagcgataaccttaacaaggtcgccttttttgattttcatagttgccattgacgttcctcctataatacttccggagccagagaaacaatcttcatgaactgtttctcacgaagctcacgagctactggtccaaatatacgtgttccttttggagttttgtcatctttgatgattactgctgcgttctcatcaaactttatataagatccgtctttacgacgagcaccttttactgaacgaactactacggccttaactacatcgccttttttaacaacaccgcctggtgttgcatctttaacagtagcaacgattacatcaccgatgttcgcatatcttctggtagatccacccataacgcggataacaagtaactctttagcgccagtgttatcagcaaccttgagtctgctttcctgctgtaccatgcttgtagcctccttttattattttgctctttccatgatttctacaagtctccatctcttatctttagataaaggtcttgtttccataactctgactgtatcaccgatctttgcatcgtttttctcgtcatgagcttttaatttataagtcttcttaacgatcttgttgtaaagaggatgtcttacgttatctcttacagctacaacgattgtcttatccatcttatcgcttacaacaacaccaacacgtgtttttctaagatttctttcttccacggtctaaaatctcctttctgataggataaactattctgcagcctttgcagtgataacagtctgaattctagcgatgttcttacgaacctctttgattcttgctgtgttatctaactggttagttgcattctggaatcttaaattgaaaagttcttttttagcatcaacgagctgtgcctgtaactgctctacgctctgtgcctgtaactctttaacgtatgcactagttttcatttgactcaccgccttctaaatctgcacgagaaactactttacacttgcaaggtaatttgtgtgtagcaagacgtaaagcttctttagctacgtcttccggtactccggagatttcaaataatactctacctggttttactacagctacccaatactcaagggcaccctttcctttacccattcgaacacccataggcttatgtgttacaggtttctctgggaaaatctttatccaaactttaccaccacgcttgatgtaacgagtcatagctacacgggcagcctcaatctgatttgctttgatccagcatggctcaagtgctacaataccgtactcaccatttgtgatcttgtttcctcttgtagcttttcctgccatggaaccacggaactgtttacgatgttttactctcttaggcattaacataattacttagctcctccttccttgtttgcttttgtaggaagtacctcgcctttgtagatccaaaccttaacgccaaccttgccgtaagttgtatctgcctcagcgaatccataatcgatatctgctctgattgtctggagtggagtagttccatcattgtatgtctctgtacgagccatatctgctccgccaagacgacctgaacatgttgtcttaattcctttaacgccggccttcatagctcttcccatgcaagacttcattgctctacggaatgaaacacggttctcaagctgtaaagcgatgttctcagcaacaagctgtgcatccttgtccggtctctttacttctttgatatcaacaactaatttcttgtctgtaagcttctgaacctcagccttgatcttctcgatctcagctccgcccttaccgattacaacacctggcttagctgtataaatgataaccttaacgcggtctgaagctctctcgatctcaatctttgaaacaccagctgcgtataattttttctttaaaaatgttctgatattataatcttctactaagtaatcagcgaaatcaccctctgcataccatttggaatcccagtccttgataacgccaactcttaagccatgaggattaaccttctgtcccatgattgcctcctatctttcatcaagcacgattgtaatgtggctcattctcttctcgattctgtaagctctaccctgtgctctaggatgaattctcttcattgttggtcctttatttgcaaaacactctgcaacgtaaaggttctctgccttatagttcttttccggataattattttctgcgttagcgattgctgactctaataatttctttactaagcttgaagcatatctaggattgtatgttacgattgcaagtgcttcgttaacactctttccacgaatagcatctaaaacgaaacaagctttctgtacagacactctagcataagataactttgctgaaggtcttgtatctctaacttcatttctctctctcttgattttggatctatgtccctttgccatggatgaaacctcctttcaataaatcttatcttacgcctgatttcttctcgtcttttccatgtcctctgtaagttcttgttgcaacgaactcaccaagtttatgtccaaccatatcctctgtaacatatacaggaacatgctttcttccatcatgaacagcgattgtgtgtccaacgaatgaagggaagattgttgaacgacgtgaccatgtcttgattacagacttgtcaccagaagcgttcatagcatctacttttttaagtaagctttcatcagcaaatggtcctttttttaatgaacgtgccatttattcaacctcctaattatttgattgcacgaccgtctcttctacgaacgatcatcttgttagactgtttgttcttctttctggtctttaagccaagtgcaggtttgccccatggagtacatggtcctggacgtcctacaggtgccttaccttctccaccaccgtgtggatggtcgttagggttcataacagatccacgaactgttggacgaacacccatgtgacgcttacgtccggctttaccaatatttacgaggttgtgatctccgtttccaattacaccgattgtagcacggcactgaattggaaccattctcatctctcctgaaggaagacgaagtgttgcatatttgccttctttagccataagctgtgcgctaagtcctgctgaacgaacaagctgtccgccctttccaggaagaagctcgatgttgtgaatctgtgtaccaactgggatattctcaagtggtaagcagtttccaactctgacctcagcctgagcaccgctcataaccttcattccgtctgtaagtcctgctggagcaagaatatatgatttctcaccatctgcatagcagataagtgcgatgtttgctgttctgtttggatcgtactcgataccaattacagttgctggaataccgtctttcttatttctcttgaaatcgataagtctgtattttcttctatttccaccaccctggtgtctaactgtgattttaccctgattgttacgaccagcgttcttctttaaagaagtaacaagtgacttctcaggagttgtctttgtaatctctgagaaatctgaaccagtcatatttcttctggaaggtgtatatgggttatatgtcttaattcccattttgtttctcctttcgatatgttttcattatcgcgtcttttctgacgcatatcattttgaagctgctttcgctctacagtcctgcgaagatctcgatatctttgctgtctgctgtaagctgtacgatagccttctttgtcttagcagtctttcctgttaccattccacgacgcttgttcttgccttcgcagttcattgtgttaactttggcaacctttgttccttcgaacattctctctactgcttctttgatcatagtcttgtttgcatccgggtgaacaaggaatgtgtacttcttctcagccattgcattcatactcttctcagttactactggtttgaggattacatcatagtactgtacgtttgccattatgcatatacctcctcgattgttgctacagcagcctttgtaactactactgtgtcatattttaatacatcgaatacgttaagctcatttgtctgagttgtcttaactgtcgggatgtttgctgcagaagcgataaccttctcgtccatatcatttaatacaacgagtgccttctcaacattgaggttctttaatacttctacgaatttctttgtcttaatctcatcaagcttaagctcatctactacaacgaacttgttctcaacaactcttgatgtaagtgcagacttaagagctgctctcttctctttcttgttgagcttgaatgagtaatctctaggagtaggagcgaatacaactccaccacctgtccactgtggagatcttgtagaaccctgacgtgcatgtcctgttcccttctgtctccatggttttcttccgccaccgcgaacttcagaacgtgtcttagctttctgagttccctgacgtttatttgcaagctgctgaagaacagccatatgaactaaatgctcattaatttctacgccgaaaatggaatcatttaactcgatcttgtcgacttctttgccttccatgttatatacagctacgttagccatcgtaaagttcctcctttcttactttgcactatttaccagattttgtagtctcttttactgtaatgagagctttcttagctcctggaactgcgcccttgattaacagtaagttcttgtctgcgtcaactcttacaacctcaagattctgagttgtaacctttacgctacccatgtgtccaggcattccttttcccttgaataccttacttggtgaagaacaagcaccgttagaaccctgatgacgatggaatttagaaccatgagccattggtcctctgtgctgacctaatctcttgatagcaccctggaaacctttaccttttgaaatagcagttacatcaaccttgtcaccctctgcgaagatgtcagccttgatctcatctgctaaattgtactcatctgcgttttcgaatttgaactcgcgaacgaatctctttcctgaaacacctgcttttttgaagtgtcccatctgagccttgttaacaccatgtctgtgtgctacgctctttttaccgttggcatccttctcaacgactttctctttcttgtcgccgaaaccaacctgaactgcgctgtaaccgtcattctcaacagttttgatctgtgttacaacacatggaccagcctctaatacagttacaggtactaatacaccatctgcattgaagatctgtgtcataccgatttttgttgctaaaatcgctttcttcatttctttacctcctgttttctacagcggaacgcctcttgcctgtcaacccagcccgcgaagaattagccggaacaagtagcggaaccgttcatcctagagcagcctactagatcgttatgctttcgcactgtatcttctatataaaccattcggggatatactaattaattgttgaagcttatttctgcttcattttgatatcaatgtaaacaccagctggcatttcaatccttgataaagactctgttgtcttctgtgttggattgatgatatcgataagtctcttatgagttctctgctcgaactgttcacgagaatccttgtacttgtgagtagctctaagaattgtaactacttccttctttgttggaagaggtaccggtccgctcacctgtgatccattcttctttacagtctcgatgattttctttgcgcttgaatctactaactcgtgatcatacgccttgagagtaattctcattacttgacttgccataaaaaaagtcgcctccttttcgcacttttaacttcagtacgacaagcggtgactgtacacatctccgtgtgtgtcctgtggactttcacacgttgtttctacattttgtagaccatatctgttctgtacagtgacttgccgtcagtttcctaacttgacattcgctccgccgaattctctgtctcatggacagtaacttcaaacttcatagctatcatgccacagcaagtgatattatacatgacgtttccaataattgcaatacttttttcaaaaaaaatttatttttttatttcgggtaatattccattgaaaaattacacttttgcacgtatattattatagaagaaacacgattaaatgcaagcaacgtgtagtttattttttacacgcagataagaaaggaatataaacatatgtggttagcagatagatggaaagattacgaggttattgactgctcatgcggtgaaaagcttgagcgttggtctaaatatattttgctgcgtcccgatcctcaggtaatttgggacactccaaagactaataagaactggaaaaagcttaacggtcactatcatagaagcaagaaaggcggtggtgaatgggagttttttgatctgccgcaggagtggaccataaactactctcttcctattaataaggagctcacattccacttaaaaccattcagcttcaagcacaccggtctgtttcctgagcaggctaccaattgggactggttttcaaagaagatttatgatgccaaaaaaagcggtcgtgatgtaaaggtattaaatctctttgcatacaccggaggtgccactcttgctgccgctgccgcaggcgccgctgtcacacatgtggatgcttcaaagggcatggtcacatgggctaaggaaaacgctgtaagcagcggtcttggtgacgcacctatcagatggcttgtggatgactgtgtgaagtttgttgagcgtgaaatccgccgtggcaatcattacgatgccatcataatggatccgccgtcatacggcagaggtcctaagggtgaaatttggaaaattgaggaaagcgtatatccgcttgtgcagctttgtgcaaagctccttaccgacaagccgcttttcttccttattaattcctatacgactggcttgcagcctgcagtgctcacctatatgataagcactgcgcttaaaaagtttgatggtaaagtaaccgcaagcgaaattggtcttccggtttcttcaaacggactcgtgctgccttgtggtgcaagcggacgctttgaaagtatctgctaatcagttctaaaataaaatcagccgcagtatttcattattttctatgaaacactgcggccttttaatgaatacgcaatatattacaatattctttttttcttcagtaaaatcagtatcagcacacatatgacaaccataacacctattataatcataaatccatgtgctgtcgtcgcaagcggtacccactttgagctgacattcataccatagattcctgagataaccgtcgggatagccatgataagtgtgatgattgtgagcgacttcatgacattgttaagtctgttgtcaatgaccgtgctcataagctctctggtaccatttatgatgtccctgtaaattcccgtcatctcaatagcctgcttattttcgacaattacatctccgagaagctccttgtcctccggatactgctcaaggcgcttgtatctggtcagtctctctaacacaactccattagcacgaagcgatgtggcaaagtatacgagtgtggattccagctcgtgaagtgcgatcaaatcgtcctcctctgtatcctctccgactctctcctcaatctcagtacgcatcttgtctatgatacgcagatcattctgatacagtacagatatcctgtaaagtatctggtatacaaagcgcatctttttcttggtggaaaattcctttacacggttatttaaaaatacctgaagcaccggtgtatcctctgtacagactgtcactatctcatcatctgtaagtatgatgccaagtgggattgtggtatatgactccttgtcatgcctagtctctatcgaaggtatatccacaagaatcaacgtatacccatcctgcagctctatacgtgagctctcctcctcatcgagtgctgcaagtacgtcctcaatatcaacattcaaatcatccgctaccatctgtccctctgctacagaagggttgaccatctgtatccaggtacctccctgcagcgtatccagctcatgtattaatttgtcatctgtcctgtaaaacttgaccatggtgcctccccgtggcttttatgacacacataatgccacaaaatattttgacatcactaacgtattgtctttgaaataaaagatattacttctcagcgtatttctgactctggctctttataagctctgcatcctcaaagtaatttatcctcatggcgcgcttgacctctgccattgtctgtgctgcagtctctcttgctgtctcgctgcccttccttaatatctcatatacagccggaatatccttctcatactctgctcttcttgcgcggataggtgaaagctcctcctgcatgatgttgttgaggaatttcttaatcttcacatcgccaagacctccccttgtatagtgatccttaagctcctgaagattagcatactccggcagatactcctcaaaatgtcccggcttagagaaagcatcaagatatgtgaatactgtattgccctccacatgtcccggatctgaaatctggatatgtgtcggatctgtatacatgctcatgattttcttctttacatctgcctctgtatctgccagatagatacagttgcctaatgatttgctcatcttctgtccaccatctgtacccggaagtctgcagcatgcctcattctcaggtaaaagcacatccggctcaacgagcacctcatcatagatagaattaaactttctgacaatctccctggtctgctctatcattgggagctggtcctctccaaccggaacagttgtagccttgaaggcagtgatatctgctgcctggctgattggataattgaaaaaaccaaccggtatacttgcctcgaaatttcttagcttaatctcattctttactgtagggtttctctgaagtctcgatactgtaacgagatttgagtagaaaaatgtaagctcagtaagctccggtatctgtgactgcacaaacagtgtagacttggccgggtcgagtcctgctgagaggtaatcaagtgctacctctatgatattctgtctgattttctcagggttgtcaaaattgtccgtgagtgcctgtgcatcggcaatcatgataaatattttgtcatactctcctgaattctgaagctcaactcttctgcgaagtgagcccacgtaatgtcctatatggagccttcctgttggtctgtctcctgttaaaataattttttccatctctattattcctctgctttagttctattattacgattgcaatgtaggtttattcgccaaaccgtctgtcttagcaatcgccagctttctttattataacacactgacgtgtaaaagcctaggaaaaagaactttcattttaattattttataatatctgcatactctgcctttgccgccctgcacaaatcatccggtgacagcgtaatctgaagtccaagcctgcctccgctgaccgtgattttgtcctgctccttagctgcctcatggataaatgtaggatactgttttttcattccgattgatgtacagccgccccttatatagcctgtaacctttgtcaaatccttgagatgcagcatctctatggacttctcacctgctgcctttgcggcttttttgaaatcaatttcgtcatctatcggtaccacaaacacatagtatccgccgcttttgccaactgtcgtgatagtcttgtacatgcctgcgtggtcaagacccagcttgtctgctatctgagctgcatccacaaagtcatcgcactcgtatgtgcgtgcctcatatggaatcttcattgtttccagtattcttattgcatttgtctttgcttctttttttcccattatactatctttcctccaataaacttaagatatattccatatccaagcttcttatatttttttcaatatttagtataaagatgtgttccttgttattataatacaacggaaatttgatatcgtaaataccttataaagtatctaaaaagccacgacacactgaaatgtatgtcgcagcttttttattcaacaactatagctattcacaaacacctgcaattagagaaactaacatgtcatatctttatgcaattgcctcattttactaattgtccgcactcttatcagcatttttgtatgcttcctcaaagaactgctcctgcgaatctatcggtgtgctgtttatctttctgtccatatactcaccatcagcgcaaagctccttgcccttctcgtcatctgtcatgattgtatcgaagatatggcggatcttgtccttagcatttgcatcgtatacaggtgttgcaacctccacacgtcttactgtatttctggtcataaaatctgctgacgcaatgtaaatcttctcatcatcgcccacaccaaatctgtatatacgtgaatgctcaagatatcttcctacaacgcttattacagtaatgttttctgtggcaccctcaacctgcggcttcacacagcagattcctctgacaataagctcaaccttcacgcctgcctgagaagcatcgataagcttgtcgataagcaccttgtcagtgagagagttaatcttaactccgatgtatgccggttttcctgcattcttattggcaatctgctcatcaatcatatcaacaatcttattctgcaggcattttggggcaacaagcagatgttttacatctccgtccgaaacagtctcacctctctgaagcgccataaacacccttgatgcatctgctccaatctcctgatttgcagtgatgagggataaatctgtataaagccgcgaggtcttctcgttgtagtttcctgtaccaatctgagtgatgtactcaaagccatcaccctttttctttgtaatgaggcagagctttgagtggaccttgtaatcaccgagtccgtaaagtatctgacagcctgcatcctcaaggcggtgtgacatctctatgttgttagcctcatcaaacctagctctgagctcgacaagcacgataacttccttgccattttctgcagcctctataagtgcatcgataatctggctcttgtctgccactctgtatagtgtcatcttgatggacaccacatctgggtcctctgctgcatcgttaagcatcttgataaacggcttcatgctctcaaacggatatgaaagaagcacatcctttttctcaacctgaccgagtatactctccttaagcgaaagctcaggtgtgtcacgcggtgtacgcttctcaaagaaaagctcctgcttgtctcgcagatagtgctgaagctggaatacgaatgacatatcaagcggtgtttttacactgataaaatgctttttgccaatctcaaggaagcttgaaagttcatcaatcgccttgcgattgatttttcttgaaagctcaactcttacaggatcaagacgcactctcttcttgatgagctcctccatcatattacggtaatccatatcctcatcatacatgctctgcgcatcgatatccgcattacgtgtcacacgcatgattgatttctcacggattacatactttggatagagcttggatacaaagtgtaaaataagctcctctgacagcataaatgtgcccggtcttgtaggtatctcgataagacgcttgaatacgctgtttgagcatggcacgatacctgtctttttcttccccttctgtgtagttaaaagcactaccgcatagagctgtttattggcaaggaatgggaacggctgctgctttcctataatcatcggagagaggaaaggtgcaatgtgtgcatcaaaatatgcctccagcaaatctccctcatcctttgacagcttgttgaaattgattatgcgcacaccctttggctcgagctcacccatgagctgctcgtatatccttgctttcttcttctcaagctcacatactctgtcaaggattgccgatacctgctcctcactcgacatctttgtcttgttctcgaaaatcttttcctttgaattcatctgcatcatgagtgatcctactcttaccatgaaaaactcatccagatttgtctggtaaattgatgcaaaggtcagtctctctgcaagcggtactcttggattgcccgcctcatttaatactcgctcattgaactgtaaccatgacagctccctgtttgtgtaaacttcttccagttttttcatctgcatatatgctcctattctatatgatatttttccattcgcatccgcgtcttttaagttcgttttattttgtgcccgctgtatttcaagcagccttgcccgctctatcagtttatcctcacggcgtctccttctgtctgccagatgaagctttttttccaccccgacaagcagccccgcaagtgccttcaaaactctttccctatgcaatatttacctctccgttgatatcatctgataatattccaattctcgctataccgcacagcacataatgcttctgcaatgtccgtgcactcttaagttcattttcgatatttttgccttttttgtcaatacattcatgcaaatttacaaacatttcttcaacgatatcagcacatctgagtgtttcctttgcagcaagctgcattaccacctctttgacgcatttttatatgaattaaggccgtccacattggtagtttgtacctcttgtgaacagcctgttatcatcgttgccatcattcctatgacgaccgctttctttggtaatttctttttcaacataattaatctctccattagcatgataaattattaaaattaatcaataactattcaacaagttaataatatcaagctaatgtaaagtccaaaacgcagttatgtaaaattaaggtaaaaactttacaattctttactcaactttacataaaatagattcctgtgcatttttatatatcttctaggcattttttactatttctacggcaatatccggataatttgtgataattgcatctgcttctgccttgacaagtgccttcatctcatgcttttcgtttacagtccatacatgagctctaagtcctcttccgtgcgccttgtcaatgtagttttcatcctgcatatggtaggttgccggatgaagcgcatccacatgaagctcgcttgcatactctgccggatttactataatgtcagaaaaaagcagaccgcacctcatatcagggcaaagctttttcatgcgcacaatcgactcgtgattgaatgacgagcaccagattctgtcaagcatatcatactcttccacgagcgccagtacctttttctccagatttttgtactgtacgataccgtttttgagctcgatatttatggtcatctctgtgtttttgagcaggtcaaacacctcatcgagtgttggaatgcgagtcttcttgtcataggacggcatgtgctttgacacattgagccgcttcagttcctttagtgtatagtcctttacaaagcctttctctccactcactctgtccacggtctcatcatgtatgaccacaagctctccatcctttgtgagctgcacatcaagctccacgccgtcagccttcatcttttctgccttcttgaatgcctcaagtgtgttctccggtgcatatccggatgctcctctgtgtgcccagacctttgttccctctgtatttatcatgctttaagccttctttcgttactttttattttagttattttcatgcctcggtgcatcatatctgtctgcaagccttaaaaatacaaatcccactgcaaagaatattgccatagttgcaaccgccacatttatcgtgccgcccgcaagctttactgccgctatgacaagcgagcctaaaaacgaagctccctttgcaaaaatatcatagattccgaaatactctcccgagttctcaggaggaataatctttgaaaaatatgagcgtgacagcgcctgcaatgagccctggaagcatcccacaccaaatgccatgattccaaagccaatcagatcatgcagtgtaagtgcatatagacaaactgcaaaatatcccgcaatgcatacatacaaaagcgttgtagttttgtatgtctgtgacagtcttccaaagacaagtgaaccgatgcatgccactatctgtgtaaaaagtaaaaacactacctgtcccactgaatcaagctttaaatcagttcctatgtttatacaattatctattatagttcctacaccatctatgtaaaggaaaaaagcaaccaaaaacagtcctacttttttatcttttgtagctatttttttgattgttccaaaaatctgtgcaaatgcgtcagctataagtcttaggactcccggatttttgtttgttttgcttttctctttgatattgtctcttataaatacatcattttcaaaattcttatgaatatctttgtctgctgcatccgatacataattcacttgtttatagctcttaaacaatggaattgtaacaacaaaccaccaaattcctgtaaccgcaaagcctattatcatcgataggcggtttgatatgtatccaagcatatccggtccacagatgtacgctgcaagcgaaacaagaaacggcacacacgagcccagatatccccaggcatagccgtaggaagacacctcgtccattctatcctttgtcgtcacatcgacaagcatcgagtcataaaacaccagagatgcattgtaaaatatctttgtaagcacatagataacaagaaacagcacccatgtaggtgtaaaaccgttaagtatgcatgccgacactccaacaactacggtcgttgaaaaaatagcctttttgatgcgcatatggtctgctatcgcgccacaaacaggcccgataagtgctgatacaactgtcatcacagctattgccaccgcataatacgcggttgccctgtcagatgaaatctgccctgcaccatctccaacggcaaggcttttgtaccatatcggtatgagcgcacacgcaagcagtgtgtatgcggaatttcccacatcatataatacccatgagagctcctttgatgagagctttttggttttcttttgtgtattgttttcttttgctttcataaattttataccttccctgttttgtatgtcccagattacgattttattttttttatgtaaaatccgctaccacccatttgcaaagtttatgtaaataatctgcccaatattaaatcagcgactccctcgcaatctccacataatgcatggcattgcgatgattctcctctatctcatcagcggtcagtgccctgactacctttgccggagaaccaaatgcaaggcttccgtcaggaatatcggtgccctgggtgacaagagcgcccgcacctattatgcagtttttaccaatccttgctccatttaacacgatggcacccatgccgatgagtgtattatcacctatagtacacccgtgaacaattgcgctgtgtcctattgtcacattatcaccgattctgacactgtggcttaagtccacatgtaccactgcattgtcctgtatattcgaatttctgcctatttctatcggttctgaatcgcctcttacagttgcattataccatacgcttgctccgtcagccattgtcacctgacccttaacaacggcaccttctgctatataatatgccatatctatccctccatcaatttcagataatcgcccttgtctatatgcatcatagaaatctgattattatgccgcctgaagccatagacacagtccacatttcggataagcgactgcagacgttcatccggtacacagacaatcagctgcaagtccatcttccttgcatacttgagacataccgcacttcgctcctgatccatcttggaaaatgcctcatccaaaagcaccagcttaatctttgaatcacgattgctctgctgcatataaagcatcgcaaagcccgcaagaagcgcaacatatttagggttctgtccctctccgcccgaatcacggcctgccatgtcatctacaaagttttccctgatgacacgaccgttttcgtccgttacctgctcatacatgctgaatgacagataattgcggtaatccgcatactgctccatttccttgcgcttctgcattcgcagatgctcatcctcatcccttggcggcatgaacttgtctgtcaaaagtttaattttctgctcatatttcttataaaaatcatcctcaccaaagcttatctgtccagctattccgccattatccggatttttactgtccagttcttccgccataagcatatcatagaactgaccgttttcgttctttgccggctctatcttaatctgataggtactgtctgagaaattagtctccctaagaagcctgtttatctcataggcatggcgctttgcagccttgatatcaccgtggattgtaccgatgacattctctctgagacttttgtagatcaccttgcactgctcctcaaactcactctcatatgccggctcataatccttctcgtacttctccagcagctcctcatatgccttatttgacttctcggctccgctgaactgacctgacggaaactcctttatatacctgtagcgggcagtctgcaacgtctccacacacgactgctgcctgccaccatttccgtctgcgccttgcagctcaataagcttctcacgctgtttgctcttgaccgatgctcctgagctatgctgcagcatatcctgtacctgcttctcaagctcctctctggcaacatagccctgtaacatatcatccagctgtgctcttcgctgttcgtttgcacctatgattttctcatgctggcttatcttttcatttatctgctgctgattcagtgaaaaagcactcttaagtgcatcgatgtttttctcaagaagcctctttttctcctttagctccttatactgcccattctccattgtcctgataatctcttcgagctcatttttctgcgaattaactgctttaagctcatctgacgcctcagaaaggcccacaaaatactccggctccccctttaagcactcaaaatctctctgtgccttgagacttgaaataatacccataagctgtatccggtccttctcaagcctctccacatctgtctcatactcagcaagtcttgccttggataccctgcctccgatgcaggcatttgtagtataatcgcgcttcttcagatgtctgaaaataaagttgctgtatgagtagcagtccggtgtaactccatctcgtacctgctcaagctcgtcaacactccggcactttataatatgcccaagataccttttcaggcagacatctacatacttttcctttgtatccaccgcctcatagagcgaaccatccatggcctttggttcactgtccatgatagccttggaattgatgaggtcgacatcctcaaactgcttcatgtctctgaaaataacagcagcagtatgcgcataacgcggctctgtgataagtgagaacttgagcctgcccatacgtccttctatggcattcttccattcctcgtcctgtacatcaaacatatccgcaaatacctgtaccttcacaggctcgccaaatctatcacttaagtctctctgcagcgcagctcttgccgaacgcaggctctcactgtacgacttgcggttgttcttcatatcatcgaccagacgttttttctctttaagctcttttgttatctcatttttctgcgaagtattgtcctcgagctcatcctcgatatccttctttatagactcaagctttagatgaagctcctgacattttgcctctgtgacatcgccatccacaatctcttcaatgaggtttaaaactgcattgctcacataatctgtgatgacctcatcctcatcccaggcctttagtccgtttgtgattttaatccactgacggctgttgtcggtaagcatgagacttctcttctcaagctccctaagctgatcctttttgcttcctaagtcgctcgatttcaaatctgcacatacctggatatactcctgctgcacagctgcctgctgcccggctatatcatctgccttttctgaaagcctgtcctgttcttcttcaatacgctttttatcatcctcagctgcctgaatctttgcacgcatatcctcgatatctatgcacctgatcattgtctctgccatgacaatatcgctttggatattcaaaagctcctgtcctgactcctttatttccttaagaagctcaatacgcttgcgcatatcctctattttttcccggatttgtctgtatgcatcgagctgctcgctgatagtctctatcgtgcccgagtcactctttggaaacatataatcacgtataaactgacctgttccatttgtcatcctgagcgcaatagcacttttttccattgtgataaaacgattcgggtcaatatatcctaaaatcacatcatataatgtgccaaggtatgcctccttcgatgcgtaaatacggttgacatcccctctggcgcgcctgtcagctgactgtgagcgagtatttataagctttttaatatcattatttgaatagcaaaagccgtccgctgtcacatatgaaggctccggcatcctgcccgaatgactgaagtacacaaatctcttaatctcagaatcgttttttcgtacctcaaaggctattcctatacatgtaaacgtatgactgcctgtatcctctatctcaagcgctatgaccgaacaaaaatcacagtcgccacgatttgcggagccatccttctgctcacccctcaaatagctcagaacacttctcctgttttttgcatcatctgcagccttgttcaagaaggtggggctgaagctgccgtagaggattacctgaatcgcatccatgacggttgattttcccgagccactcttaccactgaacaaattgacatactcattaaattgcaaaaccttgtgatttattccgccccagttgtttagacacattctggtaaatatcttcttagactgactcaattggtaactcctccatttcactgttcttggcaaattcatgggtatggtttacagaactgccttctgtattcaatccggcagcttcaagtgttgcagccgactcgttatcatacttaatcagctccacctcatcactgtacatgcgcacaagctcatttatatccatggctgagcagaatatatttactgtgccataaatatagattggtgtgttgtcctccaggtttgcaatagcccccggcagttcaatcatctgatgtgttttcataagcaaaagagcgtctgaccattcctgattagtgagctttctggtaatcagattggtatttctgccatactcacgaatctccgccagattcgttgttgtcgcattaagcccctcgcccatgattttatccctgtatatcatcttcattataatgacaagccttgcagtcagaagagtcatcttctcaagtatgactccatcaccctttattctgaaaagatgctcctgctggtcgtgaaccagctcacagtcaagcaccgccagataatctgcgataaactctctgtttctaaggcacacctgataccttggattatccctctgaatcaatgtaacagggtcacacttcatttgcaaaatacaggtctgcctcaacagatcctgaatagtttttctaatattttctgcctcatttggcgaaacattctccatatattcaaacatacattgctctcttttctatacctctcgtttagagtccgattttgatattacaagccttgagtagcttacaccatcattctttgttatctctccatccagactcaccgtatcctcacccatgcgctcattggtctcctcctgccataaaaacagaagcttttccagatcctccatggattctacagtttgttcatctgtcacaaacatgccatcacgcatatttttatctctgaagctttgaagctcctttttggtatacaatggctttggcacaaaatctgccatatcatcttcgcctgccgaagcatcgtcaataacaaacggaacaaactcacttcttcctctctctcttcttcccggaaaactgtcgtccgttacattgtaaaactgtctggtgaacttcattctgtttcgaagagccccaagtatctcatctgttttatcactcttatctatcaggttaatgagctttactatattatcctcgtcatctgcgccttcctgcaggatatagtgtatccttgcaagcgccctctttgcaaaaatcgtcttctgctcaataagcttgttgtactttctctcaatcaggtcaaactcatgctccaccttatagacaagctcacttgccttatcacagtactccacgctgtactcatagcgttttctctcaaacgtaccgggtgtagtctgcgaaagaattccctcaagctcagccctcctatcatcgttctgattaaggattttacttataagctcctttacagcctccttgtaacgataaaagctatccgtggttgtaaggatggcataacgtctgctatcactgttattaatttccttaatcagcaccttctgtatacctataaaatccttcatacgtgacagctcatcaaaatatgccctcataccatcctgcatatttgataaaagctgaccaagattttttgacgtatacaacgcatttttcagaatatcattatttttttccggatctgaaaagtatgtaaaaagcgcactgtaaacagccagaatgctctcgcgctccctgctgtcatcatccacaagcagctttttaaacagctcagcatacatctggctgtactgaggaaatgcaatcacatatgtgttgagcttttcatcaaaatcactcctgatccagccccagtttataagcctgcccaatatagctgatggtgtcagggtgtatgcgaaagtggcctggtcatatataacatcaatttcggaatcaggattataatcatcatgattatccatgctgccactatctttatcactctcatcttcattataatcagtctgccatacaatgcctgtttttgatatggtatccgctatgattatctgacactcctcacgtgtcagtcccagtgatgcatagacctcgttattctcctcatataacgcaacaactatctgcatgtatgcatccatatttttcgtgcggaataagctataaaattcttttggtattctatctttcaatgtcatactcatataataacatatccccacgtttttcgccatatacatggaaataaacgtggggatattaatattgctgcttcacacctcagccttaacagtaacatccggttaccatcaaatcactgctgattgtgaccaacaataattctattcaatataatatgcttactgctcagcaactctcagatgacgtataagctcatctgtgatagtcttggatttcaatgataatttgacaatattcgtcatttttgacatagcgcctgattttaaaaacgatttatagtcaaatacactaattcccgcttattacacctcgaaatccatacatgccctatttgcagtaaacggtctcaccttggtatctgccactgcaacatgcttaggattctttgcgtatgctgcaagtgcatcagcatcttcaaatgtagtatcaagcatcacatctacggtagatgtcggaagataatctgtgcgaactgaaatgtcgatcattcccggaatctgtcccttaagtccctctaagccttcctttatgccggcacgtatttcagccttctgtgcctctgtgtactcatccttgagtgtccataaaataatgtgtttaaccattgtgttcctcctgagtttatcaggtctttcgaccagtccaaactataacataataatttctttaatgttcatctcttctatagttcaaaaccataaggtgaatggagacctttgtatgaataatatgccattcagaccgctatgtcaattacatattctaccccatcgcttcgtttcctaccccattttgcaccttttgtggcagaaaacatattaggcaaatattttctccaccaattctttataatgctttttcaacatttcacacgctctgtcagcttataaatatcatacaaatgtcttgcatttctgtgagccttgccctgtaggtagtaatcgcatacagcaaaaactttatcaatcagagtcgaagttacgaatcacaagccctaactcatccgcaagaggcttcaatatgttatatttcagtttctttatgcaagtacatgatctaactccaattcatatatcgtcactaatatagcttccgcattacattcctttgcaatggtatgtatttgcctaacggcattatcttgtatcggcgaatattttatctcaatacaatatttaatttcattcttttcaacaaaatgtctatttccatgttcttctctgttctgtattgcctggatacaacaagttcttcttcggaaaacatttttgccacacattcttcaaaaaggttatacttttcgaaattcatagttcttcaatgctccttttcattccccatacggataattatgctctgccttcgactgaaactccttcaaatcacaaatcttcatatccgcatcaaactcggcaatagtaaccccatcaaaaccatccacattgccctcgtagtcacactcaaaataccattccacaacagctgtattccctgacgcaatcacacgctttatatcccactgcaaaacagtacctttccggttccaatcatcaaaccatctgattatctgtccaatgcctttatatactggaccataacactcactgtaaataatatcatcgctaaaaatctcttttacatcattaatatctttatccaaccagcattgaaaatattttcttataacatcttccattctgttcttccccccttcatcctctcaatcgtttcctccacagaaatacactccgcatccccgatatttttgataatattcgaatttgattcctatttatatgttcattctttaaaatatataattgatatagctgtgtatctagcataatgtcatcaatctttgttgtgactatattccatccacatttcggacaaatcaacccattcacattgtcttcttgcattactgtcatttctgtatgacattttttgcacagcatcctcatgtcctcctccccacctcaaaaaaattcaatttaattctcttcagaatttttttcataaatcgtctcaatcactttttcttcattacacacttctaatttaatgatttcatctcctagaacttcacaagttatgtatgttttttcattcgctccctgcgtaatttcataaacaaattcatcatttatcagttccccattgggctcaccaatctcattctgaagttctttataacttgtacttctcttcaaaaagtttttaaaataatcaacggaaagttctctgtcaaccgtataatattctcttacatttccatatatcaacattgattgataatcttcacaagccttttcctgcgcatagattccctgttttgaatgccacagaaaatatctgtcatcatatgcttttttcgttgctaaatcaataatctggattcctttattttctgaattttccttatccgctgtaacaacttccatataaatgtaataattcttattatctttttttaattctatcgaagaatgcatgacacgataaagatctctatcctgacttcccgttactcctaacaaaatatcatccttatcccatgtcccatcttttgctgttttgttgtaaaattccaaaaaatcatccacttctttttgaaattcttttccccttatattaggagcaaataattcttctattttctttgtatcattttgatttgccgcagccaaaaaagccgtaagaatttcagcatattcttcatgttctgatttaaataatctactcaaaaatgttttcccacaacctgacagcaatactgtagacaccaaaagtatcaacataagtatttttctttttttcatcgtctatcctcaccagaatattaagttgttattcttgtgtttcttttagccattggtattcttccttaaattttgcttggatctgttcttcagataaatccttatcttcaaagctaatcctcacacttgttttggaagtatgataggtaatatcacacaacaatgtccccatgcaagggcgactataataattaacttctcccgttgaaaactcagtatccggatcaacaaccgttggtgtctccacgacatttagaatttcatacaccatttttgaataatatgaaaaatcatctgtttgctgaaaatcttccgcatattggatagatacaatttcattttcttcatcatatgctaaagcatatccatactttgtagctatatctgatgcctggctaatataattttgttcatttaagattgttgccaaataatcatcttcacaaccaaaatgatatgtattattataaataagattgtgtaccctgaattttattcctttttcgtcagaaaaaaatccttctcctttatcattgtcaaacgaatttattgctgaaaaagtgtgttccggatatgtatcttccaaggacataacaattctttcatctgtactttttccactcaaaggattatcattatcagtaacccgattcataatatcaaaaagattctccactggcgaacatgcagtcacagataggcaaatcccaacaattaataacacagaaattattctttttcccatatagaccgcctttcttatacatcattattttttctagcatttcatagttattgatgcttcatctatctaaataaatatagattttttcttacattctatcacattctacctcaaaactctattctcaaattatcaaagaacagccttgaaaaatgaaacagaatccccccaaaaacacgaggcttctgggataccttacgtttggacacaatgttatcttgcgctaacaaatctcttgtatatgcgccaatctcattattttctgtgtttttcgtgtccttattatcctgtattacggattttctgcgttatatttttattctctttactttttagtatcaaaatggtatcacaactccatttttatgcactgacaactttccggctgcggattcctgccctgactgttataatcgaaacatgggtgctaccataacggtaggcggttagtccttcaacagagggactgtggtctacacttcgttacgatcggtgctgagtgccacaggcactcagcacccctctgattacatcgaaacccgaatgggaatccgctggaaaggagggctaagccaatgagtattgtggacttcattgcagttgtgaacttcggtatcacctgcttttgtgccggatacacattcggcaaagataataataatacacaaaaataaccgccccagcctcgcaaactgaacggttatttttaatcaattaagtatgtggactaaccatctatcggtagcactctttttctataatcatattattacgcatctgtggaaatgtcaaaatgttcttaccttatttcaaatagtcctggcatgcctattttctcagctattatatttgcttttgaacttgtgatgtttgataacaattttgttggcaaacttttcgttttttgcaataactctcccgtactcatttccaaattgaaagccctttttattgttaccaatccttttactccttctttcggcatttttattaaatatagatcaccatagtcaactcctcttacgtcttctccatctatatcttcgatttcaaatcctttttccatccatttattaaaatccacaataattcgatacggactttccaaatcataatcacccgcatctaccagataaacggttttcgcttctttttcctgcttcatcagaaagaccagatcaccaccatcatctccaacagcaacggtatctggctgatatatatttacctgcaagtctttattcatagcatctaattcttcaagcgaatagaatgtgcagccattctctaagctcagaccatcatatttacatatgaactctttatatactgctggcactttatatttttcttcctttaattcaaatggtaaagccttacttttttgcaaattatcaaacaagtttttttcaaatctttttccgtcatttacatacattcttcctgatttactgaaagatacttccggtatcatttctgtctttatacttaaatttataaactttgcaatcggatcaaaattaattaaattatgcggttccggaaaattcttctctatattaaattcttcatattcttttataaagctcttatgttcgggcatcttaatcttatcaagcaatggactgtcttccaaaaatttcatagctatatgatacaaaccatgtataaatattgccaccatctttcccaaagtttgaatgtctttatccagcccataaatgtgttcattaatccatttacattttcccataagatcacacaattcctgtaatccgcaattaactccgtccacatctttctgatataaatcatagaaaaattttgctagttttaaatcaaattgtgtccgttttttctccataaatgtacttaattctgcctgagctttctttcccacctcatcatcatgatatgtcatggcataaaccatattataatacggagctgaataactgtaactagcaggccctgcctcaaacggcatgattttttccaacagcttgtaatcattacaagaataagcaatcacaacttcaatgaaattaattgtctgtgctcctccgctattcgctctatttccataaatgcaattgaaacgattttcctgataaatcccattcaacatataagccatatcaccggttataaaagctttatttattcctgcaaacataagtctattgctgcgcagcaaattataatacatattccagaagtatccgtctgcttttccaaattcgactttctttttaaattcagctatatccctttcaatatcactccaaagttcatcttcactagactcacccattattttttcatatttttgttgataactttttgctgcctttaccataacttatccctttctcaattctacaacccgcaattatctgacatctaattatattaaatttcttttaccgatttttgaggaacgcaatttaatttttttaccataaattcaaatatttccgcttcatatccagatgaatacaataactgaaagttattacatcgatgaataataatatacttttgtgtatttccccaaaattcaactttaaaagttgctgtcaatattccattaaaaaataatcgttttataccttttacttcaagaaagtattcgttatttttttcaaaaaaatcatactctaatgtatcatttgcattatgtgttttcaattgttgaattatttcactttgagacatttctgttttaaaaatcaaattctgtcctgcatttatatatgtcccgttagaatatttcgtatatctcttccagcgtgttacgataattatcaccgaactaatcaacattatacaaaaaaatatataaaaaataagagtactgttcatgttactccctttcctcgatttatttttgtaatatcaactgcgcacctctgcaatcctgccggatactatatcagctaggggattgactcccaccactgataccagcttgtttctcaccacctatagaagtgggagtcatctcccagctgatatagcaatttttgtattttaataatttataaatcaagtttatctaattactataatcggaactcttgcttcttccttctgatctttaaactattataaattatcaatctcaatatcgcactgcatttcttttgcttcattcatcgcctcgcttaaaacggaaatcaaatctcttccatcactggtaacaaaataattagacaaatctgtaatatctgaactaatattatttccccaaggcggtgttaaacttaagtcttcagcatcccatattacatcagagggcgaaaagtttttcagttcttttcttactttacgcaattcctccagcccttcatttaaatcctgatttttcaaacagccttgatataattctcccattaatttgggataaacacgcccccatttcccatgttcgagccgaatacatatcgttgaaaaaaaagaatgcaaaaaatcacttgttccaacttgaaaccaataatagcctactttaaatcctaccgccatatcatccctccactatttgctatgcaatgccaccgttatctgactttttttgtaaactcacaatttcgttaaactattaaatcgtattctctcgggctttgagcacctatagttacaaatcgtaactgctcctttttactataagcattttttaatatcatatatccattgatagttgtagaagcatatcttttcataatttttcttaaatcattgaagatttccttgctaattttattgtcataccatattgtagatacagttgtaggcacaattgtattttcatcatataatccgccaagattaatagcaacactcgtttcattcagatattgagatatatgtttatatttatcaaagcatattgatttgtcatcttttataacaagatattgatttcctatgtgacttccattgagagaaataccaaaataaatagttttagtaatatcatcgattttattctcatttctaccacatttataatatttaactaaattaggttcttgaaattcataaaatacactttctaaatctgttcttgttccaaatactctaaaacttcttgaagccatttgttttttcccctaaagccaagtttgcattgcgtttttctaagtataccatatcacataacaaaactctattcttatctttttatgcaactcaaacgaaaaaaacccgaagcctaagcctctagggtctatatcttgagttaatattctgataacaaatctcttgtatatgcgccaatctcacgacttcttcgttcgcgggcattcgtaaaatgcccacttccagggcgaaaaaaaaagagacttgcaagcaagcttgcagtctctttttttatcgccttgattggcactttattcaatgctttcgcgtatattactcgataactgtagcaacacgtccagatcctactgtacgtccaccctcacgatactttaatatcattttacctcatattttttatggttttctctccaaaatacagtgaaaaacgactgatttgtactatttatttttatttgcctgatttcttggcaccgttttggcaccggaagcctcagtcaaaaagcttctcttctgttgtttatactcttctctatcagctttaatttatagccaaaaagcagccagtttttcatataaataatttctaataacttttatcgcctttcttcaaaggagaaaacgtaatcttatttgccaaaagaaaaagaattattattacaataccaaatcccacaaaaagtgaacttgtatcaacaacagtaactttgtatataatactaatcacaaaagataccactggcgcgcatgcgtatgtaagtgaaaatcgaattgcagaaacacgtcctatatattctttagtaacttcttttacaaatttcacttgtacataagtaatcattaatcccaatgctgcaccaattattatcgaaccgattagcaacagtaatttttgagttataggatttgcaatatattttgaaacaaatgcaataaaaacatagtatacacctaaaacaattccacaaaatgtaacaagtgtattattttttttctcctctttcatttttgcaaaagtcaatgatcccaaaatagtaccaatagttacgcttacacttagtaatgaaacaattttggcatctccactaaacatttctcttgcaatcggggcgagcagtgcatcaaatggaaccactgctgaattaattagaatacataaaaaacatagttttaatagcttcttatggtcaaatacataactaaatccatctctaagcgaaattaaatattctctgccaattattcggtttgtcttcttttcttcttgaacagaaaattctatttttactataagcaacgctgatattaaaaatatcaaagcatctatcgctaaagaaatacctattccaaatgaactaatcactatgcctgacaagccagttccaactaatactgctattttggtacaagacacattgacacttacacctttatcataatgttcattaggaagtacatgctgaataactgctacccctgctggcatatgaaatgcttctattaatgaaatggatattgtcataaaaaccaatattaatggtgaaagcatgttttgtgtatatacatataatatatacaaaactaacagaactcgagctatatctgaaagtactaacactttctttttattcatattctcgactaatggacctataaatggttgaataattacagaagtagcttgattaataccaaaaataatcgcagaccaccctgcactatttgtaagtaaatataccaaccatgtaaaaagtattgtatctaatgaatcaccacagcggttaataatattagaagtcagcagataaacataattgtggttatgatataactcatgtttattcatatttgttacctctctaatcataatttagattgtttaatttcgcaagctatcttataaagatcctgatgttttaaagccgctgctttttctataacattatcaatttctgatatatcattaagtgattccaaatattttttccattttttcatttcaacattatatgcacagtatctattttcactttcaaatgagccgttaatgcaataacgactattactacatcctcctaagcatcgttctgtataacgacattctctgcaaaatccttttaacttactactatcaaaatttctattccacttaaaagagtccggactttcccaaatcgactttaaagatttttcacgaatatttcccgctactaatgttttatctctaatagaagtacaagcaacaatatctccattatgcagaataccaattacatgctttcctgctccacaacctgtccaagaccaattatcattaagaaaattctcatttacttttatatctttattgctataataacctatgcaatctgccaaaacaattaataattgatatagttcttccaattcacatatattttctttatttattgaagttattactgatgtcgaaatattattttttcttaattctttcaatgctttaatacttttattgaatgatcccgatctccgtataaaatcgtgagttttttcaagaccatcaatacttaaacagacacttctaattcctgatgttatcgcattatgaataaagttttcatcaatcaaccaaccatttgtaataatacttgttattatgccattatctactaatcttttcgcaataatatgccagtcactacgtgtcgtaggttcccctccagataatgtaataacttttaatcccaaatcttttaattggtcacacacctcaagagcttctgatgtattcaactcatcgggtagcgcttctgcacaacttgaaccgcaatgtttacaacgcatattacaacccattgttatttcccatacagctgtagttaatttattcatatattctctcctataatcctttttaaataaaaaagacctactctatatttctttttacatagagcaagtcttttctacaaactacattctcacacctgttccgtacataactggtccaaataagttcttagaggtttttaattcagaaatctttacaaactccaagctcaattcttcaagattaaacatttttatccacctcccatttattgaatttatcttaagaatacatctcttattttcaaatgtcaagttattttcattatttttcccaaatttcgagttcaaattctcgttttatttgtaacatattttccattttctacgcatacatcagatctcttaaccacttataaatgtccgtaaaattgcaaaagcaactggaatcagtgctacaaccttatattcaatcattcaaaaagattccaatattcgatttgattttgctttaagacttgcaaacgaattgcaaattgatgtgaatgagatatgttctgccagtccattttctgacacaattaaggaagaagagatttatcctacacttccagacggtttgaacggagccttagacgcaagtcgtgtaaagacttacttaaaaaattctatgtatccgttgatgtatctttttggcaaaaatagtatgcctgatgtagataatctacttacatcattctatcagcttgatgatgaagccagacaggaagttgtagaaacaatccgtctgaaactgcaatatcatcgagatccgaaacgtgctgaacagatcaagcagattaaaggttggtaaaaaatcactcctgtgaatggcaaacattcgcaggagtttctttttgggcaccgttttggcaccactggtcttatttttcaattttaaatttatctgtattttatcttgctgataaatatttcgctatttctctacttataatttttcaaatcattctctctttaagatacagaaaaacccgtagaaccgaagttctacgggtatcttacgtttagacacaacgttatcttacgataacaaatccatattaagattgtattactcgataactgtagcaacacgtccagatcctactgtacgtccaccctcacggatagcgaatgtaagaccctgctccatagctactggatggatgagctcgattgtcatctctacgttatcaccaggcatgcacatctctgttcctgctggaagctcgcaaacacctgttacgtctgttgttctgaagtagaactgtggacgatagttgttgaagaatggagtatgacgtccaccctcgtcctttgtaagaacgtaaacctgagctgtaaacttatggtgacatgttactgtaccaggcttagcaagaacctgtccacgaacgatctggtcacggttaataccacggagaagtgctccgatgttatcaccagcctgagcctcgtctaactgcttacggaacatctcgattccagtaacaacagtcttctgaacgtcctctttaacaccaaggatctctaactcgtcgttgaggtgaagtgtaccacgctctactctaccagttgcaacagtaccacgacctgtgattgtgaatacgtcctctactggcataaggaatggcttatctgtatcacgctgtggatctgggatataagaatcaacagtatccataagctccatgatcttgtctccccaaggtcccattggatcctcaagagccttaagagctgatccctggatgattgggcaatcattgaatccgtactcctcaagctgctctgtaacttccatctctacgagctcgataagctctgggtcgtcaaccatatcacacttgttaaggaatacgatgatgtaaggaacacctacctgacgagaaaggaggatgtgctcctttgtctgagccataacaccatcagtagcagcaacaacaaggatagcaccatccatctgagctgcaccagtgatcatgttctttacgtagtcagcatgtccaggacagtcaacgtgtgcgtaatgtctcttttctgtctcatactcaacgtgagctgtagaaattgtgattccacgctctctctcctctggagccttatcaatgttagcgaaatctgtagctgtgttaccagcgacacgagctgctaatactgctgtaatagctgctgttaaagttgttttaccatgatctacgtgaccgatggtaccaatattacaatgtggttttgttctttcaaatttagcctttgccattttgaaacgtcctccttaaacttttatgccccatgggctatttttataatctaccgactgctttgattatacgaaataatcaaagttttttcaagtaaattttacggcaaatccccctttttcaaggggaaatgcctttatttttgatttttataccatatatagtatatatttcatcatttgtactataaattgtttgctaatttgcaattattttgcgtggttagcaagcaccttgtcctgtacattctttggaaccggctcatatctgtcgaagaacattgagtagtttccacgtccctgtgtcttagaacgaaggtctgtagagtaaccgaacatctctgcaagtggtacatatgcatgtacaatctttccaccgccgagatcgtccataccctcgatacgtccacgacgagagttaacatcaccgataacgtctcccatgtactcctcaggcattgtaacctctaccttcatgataggctcaagtaatacaggtgcggcctttgccatagcctctttgaaacacatagatccggcaatgtggaatgccatctctgatgaatcgacctcatggtaagatccatcatatactgttgcatggataccaactactgggaatccaccaagagagccagcctttgtagcctcctcgataccttcgccgattgatgggatgtactcctttggaatagcaccaccgacaacctctgaatcgaacttgaaaagttcttctccattggcatccattggctcgaagcgaaccttacagtgtccgtactgtccacgtccacctgactgcttagcatatttgtattcctgatcaacagcctttgtaaatgtctccttgtaagcaacctgaggtgcaccaacgtttgcctcaaccttgaactcacggagaagacggtcaacgatgatctcaaggtgaagctcacccataccagcgatgattgtctgacctgtttcctgatcagtatgagcacggaatgtaggatcctcctctgcaagctttgcaagagcctcacctaacttaccctgtccagcttttgtctttggctcgatagcgagctcgataactggctctgggaactccatagactcaaggataaccggatgctgctcatcacagattgtatcacctgttgttgtgaatttaaatccaacagcagcagcgatatcacctgagtaaacctcgtccaattcctgtctcttattagcatgcatctgaaggatacgtccgatacgctctttcttatcctttgttgcatttaatacataagaacctgccttacattttcctgagtaaacacggaagaatgcaagctttcctacgaatggatctgccatgatcttgaatgcaagtgctgagaatggctcatcatctgatgaatgtctctcaatctcatttccatcaagatctgttcccttgattgaagggatatctgtaggagctggcatgtactcaacaatagcgtcaagtaacttctgtacacccttgttacggtatgcagaaccacaacatacaggtactgctgtacactcacatgttgctttacgaagaaccttcttcatatcctctacagatggctcctcaccctcaagatactgcatcatgagatcgtcatctaactcacagattttctcaataagctctgtacggtactctgcagcctgatcagccatatctccaagatcatcagtaactgtgatatcgtcacccttctcatcattgtagatataagccttcatctcgaaaaggtcgataattcctttgaaatcgtcctctttaccgattggtaactgaagcacgatagcattttttcctaatcttgtacggatctgatcaacagctccgtagaagtttgcacctaagatatccatcttattgatgaatgccatacgaggtacattgtatgtgtccgcctgacgccaaacgttctctgactgaggctcaacaccaccctttgcacagaacacaccaactgcgccatcaagtacacggagtgaacgctcaacttctactgtgaagtcaacgtgacccggtgtatcgatgatgttgatacgatgctcaagtgctcctggctttggtttagtgaactcttcaagtgtccagtgacatgttgtagcggcagaagtaattgtaatacctctttcctgctcctgctccatccagtccatggtagcagtaccttcatgagtatcaccgattttatagttaataccagtataataaagaatacgctctgtcagtgttgttttaccagcatcgatatgagccatgattccaatatttctggttctctcaagtggatattctcttccagccaaggttttttcctcctatatttagtgtcctatgcacaaccgggctctgttacaaatccggtttgctgcatgaatcaaaagcaaagctgtaagcttcttacagaaactagaatctgtaatgtgcgaatgccttgtttgcctctgccatcttgtgcatatcttcttttctcttaacagatgcgcctgtgttgttagctgcatccatgatctcgttagctaatctctcagcctgagttttctctcctctggcacgtgagaatgctgttaaccaacgaaggcctaaagcctgacgacgatcagggcgaacctcgattggtacctgatatgtggcaccaccgatacgtcttgcttttacttcgagagctggcattacattgttcatagcctcttcgaatacttcaagagctggtcttcctgtcttctcttctactgtagcaaatgctccgtatacaatcttctgagctacgcctttcttaccgtctaacataatgctgttaacaagctttgtaactactttgctgttgtacattggatctgctaatacgtctcttttctgagtatgtcctttacgtggcacgttacttccctccttaatcatgatatttgtggattaattcatcggtactcacatgtgtctctctaatgtgttcgtgcggaattgtattcataaagtgaaatcctgcatctgcaggtctaatcccaacactaacctactttagttctgtttgtgatacacaatgttgctaaattatttagcagcttttggtctctttgcgccgtacttagagcgggcctgttttctgtttgcaacacctgcagtatctaatgtaccacggatgatatggtaacgtgtacctggtaaatccttaacacggccaccacgaatcagaacaacgctatgctcctgtaagttgtgtccctcaccaggaatgtatgaagttacttcgattccgtttgaaagacgaactctggcgatctttctaagagctgagttaggcttcttaggagtagctgtcttaacagctgtacatacaccacgcttctgtggagaagaagtgttgattggcttcttctggagagagttaaagcttctctgaagagctggtgctgtagacttctttacagatgtctgacgtccttttcttactaactggttaaatgttggcattattttcacctcctgttttattttaagcagtgcaatcttatgcacgctaaaatattatacaaatccttgtctgttttgtcaagaccaattttgttttcaatataatacaaaaaagaagtccggtttcccggacttctttctttttggtttgtaacagcttctgtagcttaagtacaaacatcagtaattattcttcatcaactgattcagcatctttatcaatgactccgactgcctcttcctctgcgaaatccgcaaaatcatcatcatcaaaatcaagtgtatcgtcatcgtttacatcgctgtcaagcttgatgttacgataaatcttcatacctgttcctgccggaatgagcttaccgatgattacgttctccttcataccgataagcggatcaaccttgcccttgattgctgcctcagtaagaacctttgtggtctcctggaatgaagctgctgacaggaatgagttggttgcaagagatgcctttgtgattccaagtaatacctgtgagccaactgcaagctccttgccctcttcctcaagcttctcgttgagctctaagaagtcaagggcatcaaccatgctgcccggaagtaaatctgaatctcccggctcctctacgcggatcttctgtaagcactgacgaactataacctcgacatgcttatcgttaatctcaacaccctgtaaacggtaaacacgctgtacctcgcggagcatgtaatcctgaaccgcacgaacgcccttaatcttgaggatatcgtgtggatttacagaaccctctgtaagctcgtcgccggcctcaagctcctgtccgtctacaaccttgatacgtgagccgtaaggaatgaggtaagcctttgtctcgcctgtctcgttgtttgtaacgataacctcacgcttcttctttgtatccttgattgtggcaattccgccgaactctgtgataatagcgagtcccttaggcttacgtgcctcgaaaatctcctctactcgaggaagaccctgtgtgatatctccaccggcaacaccacctgtatggaaggttctcatggtaagctgtgtaccaggctcaccgattgactgtgctgcgatgataccgattgcttcaccaacctgtactgcctgacctgttgcaaggtttgaaccgtaacacttagcacatactcccatgtgtgaacggcaggtaagcactgtacggatcttaacctgtgtgattggatttccgttctcgtcaacaccctctgccataacctttgctgcacgctttggtgtgatcatatggttggccttaacaattacattgccatccttatcgcagattgtgttgcaagagaaacgacctgtaattctctcctgaaggctctcgatttcctctcgaccctccatgaatgcctttacaaccattcccggaatctcacgtcctgtgcctgcacagcagtctgactcacgaacgatcatatgctgtgaaacatctacgagacgtcttgtaaggtatcctgaatcggctgtacgaagcgctgtatctgaaagtcccttacgagctccatgtgctgacatgaagtactcaagtacgtcaagaccctcacggaagcatgacttgataggaagctcgattgtacgacctgttgtatcagccatgagtcctcgcatacctgcaagctgtttgatctgcttatcagatccacgggctccggaatctgccatcatgaagatgttgttgtacttatcaagacctgtaagaagtgcctttgtaagggcatcatctgtatccttccatgtctcgataacctctttgtaacgctcctcatcagtgataagtccacgcttgtactgtcttgtaatcttatctacagtgtcctgtgcatcagcgatcatctgtggcttctgtggtggcactgtcatatctgaaattgaaactgtcatggcagcctgggttgaatacttgtatcccatagccttgacattgtcaagaacctctgctgttgttgtagctccgtgtgtgttgataaccttctcaagtatctgcttgatctgtttcttaccaacgtggaactcaacctcaaacttgagtgcattctcagcctttgatctgtctataaaaccaagatcctgtggaatgttctcattgaatatcaaaagtcctactgttgtctctgtaaaacctgaaacctttgtgccgtcagcaagctttactgtacggtgtacaaagatattctggtgaagagtaatctccttgttctcgtaagcgagcattgcaagattaacacttccatagtaacggccgagaagatctatcggtctgcaaagcacacgacggtttccgtccgtaacatcctcaaaccagatgaggtcatataagccaagctcagcctttcctgtattttcatcaggagttgtgagctttctaagctcctcaatatcattgtatacagtgtctgatgacacctgtgcaaccatctttggatcatccttgtaatcagcgagctttctcattgtgaggtagtaaactccaaggatcatatcctgtgaaggaacggctacaagtccaccatcggaaggcttaagcaggttgttaggtgacaaaagcatgaatctgcactcagcctgtgcctcagcagtcagtggaagatgtacagccatctggtctccatcgaagtcggcgttgaacgctgtacatacgagtggatgaagcttgattgccttaccttctacaaggattggctcgaaggcctgaattccaagtctgtggagtgtaggagctcggttaagcataaccggatgctctttgatgacgtcctcaaggacatcccatacctccggctgaagtctctcaaccatcttctttgcactctttatgttgtgtgcggttccgttagcagcaagctccttcataacgaatggtttgaaaagctcgatagccatctcctttggaagaccacactgataaatcttaagctttggctctacgcagataactgaacgtcctgagtagtcaactcgctttccgagaaggttctgacggaaacgtcctccctttcccttgagcatgtctgaaagagacttaagagctctgtttccgggaccggtaacaggacggccacgacgtccattgtcgataagtgcatcgacagcctcctgaagcatacgtttctcgttgcgaacgatgatatccggcgctccaagatcaagaagtcttctaagacggttgttacggttgatgattcgtctgtaaaggtcgttaagatcacttgttgcgaaacgtcctccatcgagctgaaccattggacgaagatccggtgggataacaggaataactgtcataatcatccactcaggcttgtttcctgactcacggaaagcctctacaacctcaagtctcttgatgatacgtgcacgcttctggcctgtagcattctcaagctcagccttaagctctgccgaatccttctcgagatcgattgctgctaaaagctcatggatagactcagcacccattcctacacggaatgctgagcggccataagtatcgcatgcctcctggtactctgactcgttgagaatctgcttatatgcaagctttgtctcgcccgggtcaagcacaatatatgaagcaaagtacagtactctctcaagtacacgtggagataagtcaaggatgagtcccatacgtgatgggatacccttgaaataccagatatgagatacaggagcagcaagctcgatgtgtcccatacgctctctacgaacgcttgactttgtgatttctacgccacatcggtcgcagacaacacccttataacgtatcttcttgtatttaccacaatgacactcccagtccttcgttggtccgaaaatcttctcgcagaaaagaccgtctttttcaggctttaatgttctatagttaatggtctcaggctttttaacctcgccatgtgaccactctctgatcttttcaggagatgctaatccaatctgaatcgcatcaaactgcattgcctgattattttctatattatttgtttctggcattttggcactcccttctaattattcttcgtcatcaagaacttcatcagcaaaaatatcgtcatccgctgtctcaggagactcttcctcttctatgtcaacaagctcttcgttgtcatcaaattctttctttgagaaaccatgctctgcgaatgactcactgtcctcgaatgcatagtccttatcgtttccgataattgagttgatatctgtattaccgtactcacttgtctcgataagctcaacctcttctctgttctcatcaagtaccttgacatccagaccaagtgcctgaagctctttgagaagtaccttgaatgactctggaataccaggctcagggatattctcacccttgatgatagcctcgtaggtcttgacacggccaacaacatcatcggacttcattgtaaggatctcctggagtgtatatgcagcaccatatgcctcaagagcccaaacctccatctctccgaaacgctgtccaccgaactgtgccttaccaccgagtggctgctgtgttactaatgagtaaggacctgttgaacgtgcatggatcttatcgtcaacaaggtgatgcagcttaaggtaatgcatatgtccgatagttgtctttccatcgaagcactcacctgttctaccatcacgaagctgtacctttccatccttggaaatcggaacgcccttccataagcttctgtgagctctgtttgttgaaaggtattccataacgtcctcacggagtgtatcaacatatttatcatagaagatttcagcatctgcgctccagtatggatgctcagcctgtaaatccttttcaagctcttccttatcgaacggaagatttacgtaatcatttgcaagctcaagtgtatcctcgatatctacctcgtttgctccgtcaaatacaggagttgagatattgaagccaagtgcctttgcagcgagactcaggtgaatctcaaggacctgaccgatgttcattcgtgaaggaacaccgagtgggttaagtacgatatccagtggacgtccgtttggaaggaatggcatatcctcaacaggaagcacacgggaaacgacacccttgttaccgtgacgtccggccatcttatcaccgacagaaatctttctcttctgtgcaatgtagatacgtactgactggtttactcccggagaaagctcatcgccattctctcttgtaaataccttggcatcaacaatgataccgtaagcaccatgaggtaccttaagtgatgtatcacgaacctctcttgccttctcaccgaagatggcacgaagaagtctctcctctgctgtaagctctgtctcaccctttggtgtaacctttcctacaaggatatcaccggcacgaacctctgcacctacacggatgatacctctctcatcaaggtccttgagtgcgtcgtcgccgacaccagggacatcacgtgtaatctcctcaggtccgagctttgtatcacgtgactctacttcatattcctcgatatgaactgatgtatacacatcatactctacgagacgctctgaaagaagaacagcatcctcgtagttgtatccttcccatgtcatgaatccgataagcgggttctttccaagagcaagctctccctgacttgttgaaggaccgtctgcgataacatcgcctgccttaaccttgtcacccttaaatacgataggtctctggttgtagcagtttgactggttagaacgagagaactttgtaaggatatactctctcttgtttccgtcagtttcttttatgataatgcggtttgactctgaagataatacctctccgtctgcctttgcaactacgcagacacctgagtcaactgcggcctttgtctcaatacctgtaccaactacaggagcctctgtggtcagaagcggaacggcctgacgctgcatgtttgatcccatgagggcacgtgtagggtcatcgttctgcaagaatggaattagcgctgtagctactgagaataccatctttggagacacatccatataatcaaatgctgacttatcgtactcctgagtttcctctctgtaacgacctgaaactgagttacgtatgaaatgtccttcggcatcaagcttctcattagcctgtgctacgtggtagttgtcctcctcgtcggctgtcatgtatacaacctcttctgtgactaccgggttcttaggatcagtcttgtcaatcttacggtatggagcctctacgaagccatactcattgattctcgcatagcatgcaagtgagttgataagaccgatgtttggtccctcaggagtctctacaggacacatacggccgtagtgagtgtaatgtacatctcgaacctcgaatccggcacggtctcttgaaagaccaccaggtccaagtgctgataaacgtctcttgtgagtaagctctccaagagggttgttctgatccatgaactgtgaaagctgtgaagaaccgaagaattctttaacagcggcagttacaggctttatattgataagtgactgaggtgaaattccctctaagtcctgtgtagtcattctttcacgaacaacacgctccagtcttgagagaccgatacggtactggttctgtaacagctctccaaccgcacggatacgtctgtttccaagatgatcgatatcgtcatctgttcctgcgccccactctaagtgcatattgtagttgatagttgcgaagatatcttctttagtaatatgctttggaataaggtcagatatatctctctttattgcctcgattctgtcctcaagagaatcatactcctcgagaatctgagcgagtaccggatagtaaacaagctcggtaacaccgatagacttaggatcctcaatctcaggaatccagcttctgatgtcaaccatcatagaagaaagaatcttgacatttcttgtctctgtctgaatccataaagcaggaacggcagcgttctggatctgtgtggcaagcgcacggtcaacaacagtacctgcctcagcgataacctcacctgtagaaggatccactacgtcctcagctaaaacctgtccactgatacggttctttaatgcaagcttcttattaaacttataacgtcctaccttggcaaggtcatatcttctaggatcgaagaacattgctgtgataaggctctctgcactctcaactgaaagtggctcgcccggacgaatcttcttatataactctaataaaccagcctcatagcttccctgtggctcacgctctgtgattgcagggtccttgctgaatgatgcctggatctttggctcatctccgaacatatcgagaatagcctggtttgtacctactccaagtgcacgtaaaagtactgtgataggtaccttacgtgttctgtctactcttacataaaaaacgtcgttagagtctgtctcatactcaagccatgcaccacggtttggaataacagtacaagaatacagggtctttccgagcttatcatgagcaattccgtaataaataccaggagaacgaactaactgactgacaataactcgctctgcaccgttgattacgaatgtaccggtctctgtcattaaaggcagatcacccatgaaaatttcatgctcattaatctcatctgtctctttgttgtgaagtctgactttaacctttaaaggagctgcgtatgttgcatctctttccttgcactcaggaattgtatactttacatcatcttcgcataatgtaaaatctacaaaatcaagactaagctttccgctgtaatctgtgattggagagatatccgcaaaagcttccttgagaccttcgtctaagaaccactgataagaatccttctggacctcaatcagatttggcatctgcagaacctctttttgtcttgagtaactcatacgcatgctttttccggatgtgaccggacgtattctgtttttctccattgacgtttcacctctcgtttttattttaatctagcaagtatctagataatgattcaaaaaccaccccagttactatatcttgtggtttttctcttgtgcacatatttgcgaatgcattttagtgtaatttacctattgacaaatttgcatcatttaaaaaattgcataaaaatgccactgcaccacaatagtgcaacgtatactatacaacaaatccggcacgaatgcaagtgtttttttattttttgtaaaatattcaaagtatttacgcaataattttacagagcatcggataggctacgagcagaggtcccaaaaatgctcaggcattttcgggacgcgctccgactgtcgcgcaataaaaacataaaaaagagccaaggcgcaaatagaatttgcccttggctcttttttatgtttttactccgctcgtagcctatccgactatttaagagtaaccttagcaccctctgcctcaagtttagccttagcatcctctgctgaagccttgtcaagctgctctttgataacctttggtgcgccatcaacagcgtccttagcctctttaagtccaagacctgtgatctcacgaacaaccttgataaccttaaccttgtttggtccaacctctgtaagctctacgtcgaactctgtcttctcctcagctgctgctccgtcagctcctgctgctgcaactacaacacctgctgctgcagaaacaccgaactcttcttcacaagcttttactaaatcatttaactctaatacgcttaactctttgatagcatcaataaactctgctgttgttaactttgccattataatttcctccatttaaaaatttaattatgataataaggttcaaatataatatttgaattattctgctgctggagcttcctctgcagcatcctctgctggtgctgcctctacggctgcatctgcagcgccaccctgctctgcgatctgattgagtacacgagcaagatttgtgataggtgactgaatgcttccaagtaattttccaagaagctcatctctgctaggtacagcggagattgccttcataccctcagcatcataaaatgttccctcaactacacctgctttaatctctaaagccggagctgttttagcgaacttagctaagattctggctggtgctgttgcatcctctgttgatacagcgaatgcgcttggtccttcaaggacatcctttaatccctcgaactctgttccctggattgcacggtttactaaagtattcttgtataccttgtaagttacaccggcttctcttaactgtttacgtaactgagtatcctctgctactgtgagtcctaagtaatcaacaactactactgactgtgcaccattgataacaccggaaatctcatctacgattggctgtttaagttctacctttgccacgattcatttacctccttttagattttcgcataaaagacatgaggtatttgatttattaatcaaagaaaccctcctgcctgtcgacagaagggtacaagtcaaaattcaagataaatctcgaaaattccctcggtaggttctacgtttacgccttgcggcacctactgtcttcggcaatatgcattgcaattatatcaaactatattacggatgtcaattactttccgcaaaacttttgcttggcgtttgataggtcttgtaaattgttttactgtaactgtttaactatcttactgtgtaatcttaaccacgtttaacttaacgccaggtcccattgtagatgtaagagttgcgctcttaatgtactgaccctttaagctagcaggttttgctttattaattgcacccataagagactggaagttgtcgtttaactgctcgtctgtgaaagatgcttttccaactggcacatggataatgtttgtcttgtccaatctgtactcaatcttaccggctttgatatcgttaacagcttttgttacatccatagtaactgttcctgcctttgggtttggcattaagccctttggtccaaggacacgtcctaaacgaccaacaacacccatcatatcaggtgtagcaactacaacgtcgaagtctaaccatccctcgttctggatctttggaattaactcctcgcctccaacgaagtcagctcctgctgcctgtgcctcgtcaaccttagttcccttagcgaaaactaaaaccttaactgtttttcctgttccgtgtggtaatacaaccgcaccacggatctgctgctctgcgtgacgtccgtcgcagcctgttctaagatgaagctcgattgtctcgtcaaatttagctgtagcatttttctttacgatagagatagcgtcagcaacatcgtactgctctttcttatcaaatgccttaacagcgtcttgatacttctttcctcttttcatgaaaaaataacctcctggtggtaatatcgggagagggccctcccacatttacgtttctttgttattattttgggttgcataaatttgcaactattttaggggtatgttggtttcgctaagtgttagtcaaccacttcaacacccattgatcttgctgtaccagcgatcatgctcattgcagactcaagtgaagctgcgtttaagtcaggcatcttaagctcagcgatttcctgaacctgtgcctttgtgatcttagcaaccttcttcttgtttggctcacctgaaccagactgaatcttgcaagctttcttgattaataccggagcaggtggagtcttagtaatgaaactgaaacttctgtctgcatatacagtaataactacagggataattaagtcgccctgatcggctgtctttgcattaaactgctttgtgaactctacgatgtttacaccgtgctgtccaagtgcaggtccaactggaggagctggagttgcctttccagcagggatctgcaatttaatgtatccttctactttctttgccatttggaattgcctccttaatttgttttcttaacatctgcgaaacttacttctaccggtgtctcgcgaccgaacagttctacattgattgtaactgtctgcttgtgataattcatagctgtgataacaccgactgtatccttccagacaccgccgataacgactatcatgtcaccctcagcaaaatcaactaccacgttttccgtcttaatacccaaaggtctcatctcggcttctgtgagaggaaccggtttgcttcccggacctacaaatccagttacgcctctggtatttcgtacaacgtaccatgtatcatcattcataatcatatgaataagaacatagcctggaaacatcttcttggaaacctgtttacgaacaccgttcttcacctctgtgacgtcctccaacggaacacgtacttcaaggatctggtcctcaagatgtctgttttcgattgttttgtcaatattagctttgactttgttttcataacctgaataggtatgaactacataccagttcgcttctgtcataatcactttgcctccgttttaaaaatgtaaaccaataaggaaatctacgccctgctggataccccagtcaagaagcgcaataataagaccggtaactactgaaaccgccagcactgcaacggtctgtctgatgaccgattgcttctcaggccagataatcttctgaaattcagctttcagacctgaaaaccagcttgtttttggagccttttcgactttttcattctgtcccataatgtactccttcactcagttcctagactattttgtttccttgtgcattgtatgagttctgcagaatctacaatacttcttggtttccattctgtccggatgagtttttttgtcctttgtcatgttgtaattacgacgctgacattctgtgcacgctaatgtaatctttgtacgcacgacttccacctccgtttaaattctttgttgtttgtacccttaaaaaaaggcataaaaaaaagacctatttccaagcctgtatactatatcacagttgagccgtaaccgtcaagagctattttaaaatttattgtaaattcttttgaacagtgccgctgtctgcaccttttttgtgtatccggcagcaattaatttttataaatcttaaagatacataattaaatatagtacatttatctgaatttttcaagtattttgttgttgtaaatcctcaattatgtatgacgatataataaaggagcagacggctttgacacagaggtcagacagctcgtcgctccacaggtcaataccgctgttgtactgatttggtacaacagccgttattttatattttttataatagtggctgcagatctccaaccattttttcctcaagcgtcctgagcctctctgcaattgccacactctttgaatcagcatcgcgatattcattgagactgccgcttattgtctctatgcccatattacagccctccgtcagtagctttgctgcctgggactgatcatcattcactgccatcttcattgcagtctgcagcttcgcagccatctttgcaaacacacccggttccttaatatctgcacctgctttgtcaagcatatccctgcaatccactgacagcccggtgtgctcatcatagtacttgtctatcagctcacgaagctgcttgtcatctgtgtgttctcttatatcgtccatgctctcaagtgccatcttacagcccgctatgcaatcctgaagcaagagcaccgaatcatgattctctatatttctgctcataaaaacctccatacttcttttctatttagtatggaggttttcatgaaaaaatattcactacacaatcggaaactccagtttaacccaaaacttcccatgttcccttttaaagctcatgcttccattcatgcgctgcatcatcgcatccacgctcttaagccctatcccggcacttttaagaagcgttttattgtcacatacgccattgccaatttcaacgctaaaaatttttttcgtaaaagctgttttcataacaacaggcttcttattgtccgcatatttatatatattatccgtcagattggaaaatattctggtcaaaaatgccatattaacagcaacctttacctgcttaaagcttattccttctgcatcaacctcataattgcttttcataagctgagcacacacatctgagaggtaatctccaaatatatactcaacatccattgatgcatccaattcaataggtctttgtgaaccggcaattgagaaatccagcagattgtctacctgagtcctgatatccaataccttttcacttataaaattaagatttttcatattctcggcatatgcttcgttctccagtttcattacatcaacatatgtcataacaccagtcaatggcgtacgcaggtcatgagccatattacgcatcagttcatccttttcctgtcgcgcttttttctcctgttcctgtgatgcttcaagctctgtttgatagcccgctataatttttctgatgcgtagatacacaaatacaattcccatcataagagaaaatcccacatcaaaaatcattaaagctatataatattttatcgtaaatcctgtatatataaatacttccgccttaatatcggagaactggacaggcagctcatagcttcctgtaaatcggtaatcatacatatttttagccggagatataagcttatctacatttgatttattgtatattaccttcccctcttccttaacactataaaacgaaatatcatgatccgacatccattcatcatattgctcgacatctgtagtacttatattattatcagatacatattgttgaaactcatctatatatggcttttcattatcgtatattaaatgagatgtaccttcaatataattgttcagcaaatcaattcccagataatataatagtccaaaaacaacacatgtccctataatcgcaattgcaaatgtcaaagacagctttttctttaccctctttaaatcatctctcaaaacggtatcctcttccccattctgtgtgtatgcatgcatcaccacatgcttttataagcttattccttagatttttaatatgtaccataacagtattctttgcattatatgtaaaagcctcatcccataccatctcgtatatcatctcaatcgtatatatcctgtcaggatttttcatcagcaattttagtatctcatattcttttccggttaattttatctcattatcattaaactcaaccttgtttcgattcgtaaacagtttaagtccatctgcctcgatagattcatccttgtttgtgcgatttgcacttccgctgtcatatacccgatatcgtctgataagagctttaacctttgaaataagctccatgttcgaaaatggcttagtcatgtaatcgtcaccgcccacttcaagcccttccagcttatccagctcttccgattttgctgataaaaacaatatcggaacgctgtgtctttcacgcattctcctgcaagtttcaatgccgtccaactgtggcatcattatatccattattacaaggctgaacgattcatctattttttccaaagcctccataccgttttgtgcaattaccacactataatgctgcaattcgagaagcttttttatgccactgtatactgttttatcatcctcaacaacaagaattttgtccattatatgctcctatcatattatacatgtttattacatcaaaaagattataccacataaccgctcctaattattccttaatgtgcgcaaacccttattagcataaatacagcttccaatcatagttattaaaataacgctaatttccaaaagcccgattctatacacaaattgccagatattcatttcaaagttccatatatcaagtgaaaagcttttttgaaaatttgaaatctcacaaaattcaacaaaatatttaaaaatattgacagaaaatctattaagcagtcccaatgtcaatattcctgcgcccacaattgccggaacagttatcatcaaaatctcatataacagaatttgaattgtcctagatttcttctgtccaagtgtattgtatattgcaatcatttttgagtgtcctttaagccataaaacggtcagtaacgacataaccacaacacatacaatatacataacactcaatgtcacacttgtcatactttttaacattgatattacatctgtcatttgcagttcctcattcaaaacctgattgacaactgccgaattcggaacattttgaaacattttactcatatcatcatataaaagtgatgtgcttttatagtctgagctgaaaaaatttatcccataacagcttgcttcattgtttaattctacatatgaattataatcagtgaatactatactgttagctacttctttatagtagccatcgctcacctgtgtctttggagtatttattgcagtataaatcccaattaccttaatactgattgtattattttcatactgtatagatacattactgccaattgacaggttattttcagaggcaagcttatctgatatcattgcccctttatcacctgacatcggatattttccttttgaaatcttaaagataccactactgaaatattcattgtaagaagtatttatgtttccactgacatatattttatttttctcaaaatcactttgtttttctgtatatggtacattttcaaaatctactgcttcacatataatgtcacttgtaaatgcattattatatcctacaacatttttattattatctgcatattctaaaatatctttccaatcatctaaagtagaaaaatcgtctaattcaacaagaacacaacatcctgccatatctgcaaaagatttgtaaaaactctctattgccgaatctaaaaatgttgcaattccgcaaaacagtgtcagtacaaatatgcaaatagcaattagtatattccgccccggtctccctaataattctttgcatgcctgccaccatttattcctcatcgtcatctcccatttcatagcaaatatcacattttttctttacataatccgagtgggttactactataacacatctgtcctgttcatgagctatctgctgcaacaattcgacaatttttcttcgattttctttatccagatttcctgtaggctcatctgccagaatatattttgcatctgttattaacgccctcgctattgcaactctttgctgctgtccacctgacaattccgtaacctttcgggttatctgactatcatcaagtccaaccattacaaggctgtctctacacatttttatcaattcttttttgggtacatcaggtaagcttatctgggctgcaaccattacattttcaagggaagtcatataatcaaataactgataatcctgaaaaaccaatgatatactattttggcgcagttttcttccaccaatgttttgtatattttctccatccagcaaaatttccccctcatccggtttttctaaaccggcaagtaacgataagcacgttgtctttcctgaacctgacggaccaaatattccatacatttctcctatttcaaatctgtatgtaactttatccagcacatgcacaatttccttcttagatttatatgcatacgatacattaatcatttccaacatatttgccactatcccttcgaatttaacagtttctttgcattttcttcaacagttgttacaacaggcagtaccataaatgcaacccaattaaccaacgaaattattaatagaattataatgtttttcagagtaaaaaaagcactcatttctatacgtacctcaaagccttgaaatattccgggtgtatcatatccacctatggctctgtctgtactattaattatgacattcttacctataccacttataatgctacatatgaaattgccaagcacacagtataatagcacacccaaaagcaaaccactaattgcatatatcattcctataaatgcaaatctacctatacaccattttcttgaccttccgagtaccataaaaagtcctgtatctttttggtattggatagtataaaacgagaaaacgattaacaaaataatttcacccattataattatcatccagcaaattatttttgatgtttttcccatcaatcctacgactttacattctgaatcgagataattagaagtattatcatatatctccacattatctccatacattttctttaactgggtttttaccgcatctatatgctctatcttatcaatatacacttcacttcccgttgacgcggtgtactctaaccctagtaactctacaatataatcataatctacatatatagaattatatggactatgtatgtataccgaggttccctcttcatttgagtcatatatttcgaaatcactgtccactttataaattccgcatatttgtaaagacgttacctccgattggtctcctatagtatatttaacttcatcccctaccttaaggttattttttttcgcatatcgctgttctacaataattcctttattttcatatgttggaaattccccttcaataagagatacatttttttcccatgaaaacaagctatatttttgcacatccatatttgcaataatcaccattttgtcagcccgattgcgcacatctttattctccggatctattcctttatgttcctttacattctctgtatccaccggatctgcaatcagctctctccatgccccaagtcctgtaacatattttacttttctgatttcgtcataatcactctttgtaaagcctccgttatcatcctcaattactaatgcggctccattatataaatatgcatctctctcagatttttctgaggcattgcttaatagcagaccaataatttcacccaggattattgtcgcgatgattagtatgataatcaaagattttattttatttctttttatatatataatagctgtttctatcatatcccatctcctcaattattttactattgccgtttcagatatccttttaagtttttggatttcaacatcggcatcaaagaaaagatatttaccattcatatacactagatttgcaactgctttatcatcctgatacaaggtaatataaccatcatcgttccatttccagattcccgtttcaaccttatcagtattctctatctccatttcatattcaccctgtttttcatcgttatcatgtataatggctaatttattggtactcttaacattttgatactctgaaaaatcaaaagttccataatagagttccactctcagatgatttctttgttgtaatatgttatatgtaattaatacactgattacacagacacaagcgacaatcgctgcgcagataataatctgttttctatttttttccactacaggcttcccccttctttattgtttaatcaatgccggttttattctttaaatttaaaacttttattatatacaatatcaatatcatccacgctatacaagtcaaactatattctacaatcactgcaatttgtaaatagggaccttcagagtatttaaaataatagtcataaactattgatggtattttaatatttattagcagtaatattatattaatacattctttagctacactttttttgttcatatctcatttctccctccatctctatacacaatattttattacttatatcgatttagtcaatcgtaatttagttaatcataaataactaaatcgtaaatgactaaacattcatctcacattctgtgtatgcaaaaaagacggccgtcccggtccccaccggttcagccgtctttataataaatttcaatgttatacttttatattttactcttatttatacttttttactaacttttatacttgtttggatttagcatctactgctgtgcaagcactgcctgtacctctgcctctgtagcgcatgccattaccttgtctgccaatgccttgcattctgccatgctgctgtctgcgatggtctttctggtcttgagcacacttgtggcactcactgagaactcatcaagtccgaatgcgagtaacagcggaatgagctttggatctgctgctgcctctccacacatgcctaccatgattccctctttcttaccgcactcgatgatacgcttgattgcgcgaagcactgccggattgaaggctgaataaaggtatgctacctttgagtttccacggtctactgccattgtgtagcctgtcaggtcgtttgttccgatactgaaaaaggctgcctcttttgcaagcacatccgccatcatgcaggctgccggtgtctccatcatgataccgatttcgaggttcttgttgtatgcaatgccctctgcatcaagctctttcatgatgtcagctaccattgcctttacactgcgaagctcatctacgcctgtcacaagcggaaccattatctttatcctgccgaatgcactggctctcacaagtgcacgaagctgtgtattgtagatgtctgttctctggagacagaatctgatagctctgtaacctaagaatgggttgtcctctttctcaaggcccagatatgggatttccttgtcgcctccgatatcaagtgtacggatgatgacaggcttgcccttcattgtctctgctactgatttgtatgcctcaaactgctcttcctctgtaggaattgtatctctgtccatgaaaaggaactctgtacggaaaagtcctattccctctccgtcacactctacagctttctttgcgtcctcaggctttccgatattgcatacaagctctacctttgtgccgtctgctgatactgttggcacacccgcaaatttctttaagagctctttctcttttttgtattcctcaagcagcccagcgaatttctgctctgtctcagcgtcagggtttacgattgcctctccgcttgttccgttgagtaccactctgtcaccatttttgacagatgtacagattccgtcaatactgagaactgccgggatttccatagctcttgcaagtattgctgagtgggaggttctgccgcccacctctgtgagtattcctgcgatattctctgccacgatacctgctgtcatggatggtgtcaggtcatgtgccacaagcactgtgcctgccggagctgctgagatatcgtagtcctcgattccaagcagaatcttaaggattctggctttgatatccctgaaatctgttgctctctgctgcaaaagctcatcaggtatctgtgcaaatatctctgctgtctgctcaagcacctggtcgagtgccttctctgccgtgattttctcacttactatgagcgctgtaatctgctcctctatggtcggatcctgaagcatctggatatgtccgcgaaggatatccgcatcctttgctccgactgtcttttccattctgtctgccatggcgtttgtatcatttacaaatttctcaatggctccctggagacgtgcgatttcagcgtctgtatctgtaattttcttattctcgatcactatctcatgctcttcgataatgaccacatttccgattccgattccttctgagccggcgattcctttgtacatatcacacctccgattgactttactggttgattaatctccgaagttgtctgcctcgagctcttccatctttgcaagtgctgcttcctcgtcagctccctcacactcgaatgtaatctctgcatccttcttgatgcatgctgcgatgatgtttacaaggctctttgcgttgattctcttgtcgccgaatacgattgttacgtctgaatcaaacttgcctgcctctcttgcgataactcctgcaggtctcatgtgaagtccttctgctgcttttactaccattgtcttgcttaccatagttttgtcctcctgaatttaaaattattggtttgtttgtttatttcgctcacacatatgattaactgtatcgccctctgctattcatcagcctgtcatatgtccgttgctttctatggttttattgtactgtgcggtatgagttttttcaatattccccaaaatgcaaaattgcaccatctctggtgcaattttgtattaatgtgatattcagttccaccccagctctttccgtatagctgcacaaagctcatgaggtgaagcagcctccctgagcctgtccgtcgctccattttcattcagaagctttgtgaagtcatggaaaaatgcctttgtcgtgttgacactgtcaaagtttatcgcaagcagaaatatcatgtctgccattctctcgccccactctatcggcttgtcgagacgtataacaagtatctggcagcggtttacatgctcaggctttccgtgcggtatggctatattgcagcccacagcggttgcctccaccttctcacgctccagtacatccctcgcaaactcgctctgcactattcctttgtttatgagaagctggcacgcgcgctttaaaacatccttgcggtttttcgcctttttctcaaatatgataaattcttccgacagcatctgtgaaaactcgctgacctccgcgctctggccggtcatgagctcaaagcacttgtttctgatatttttctcatcctgcgcactgattagtggagaaacatacaaaaatctcatatccttgtggatatctgcctgtgtgtctattgtcgagagtatgaggtcgcagtcatactcgtcaatatgctctatgcggtctgacgacaaaatgcttactatccttacatccggcactctgttttctattttgcccgctattatgctgccggtcgcatagcctgctgcaccgattaacactgcgcgcactgtcataggatttctgtgcagggctcctcccacctgcaaggcaataaatgctatctcattctcgctcggcatggcgcctgtgtacttttcgtagtatctcgataccgtaaagcataccgtaaagagactggcatacgattgtgtgatatcggaaagaaacggattgtctatctctatgccaaaatgagtcctcgcaatggagcccggcaaaaagctacgcatgctctcacgtagaagctcattttcaatcagattggcagcgagaagatttgacagatacactatcatctcatcctctatgctaagcgcctcctcacaggacatgacaatgcgattttgtccctcggcacaggaaaaaagcattgccagatacatgatttcaggctgtgagaggctgatgccgtgatatctttccagaaagcctgctgcctcctttgccatgttctcatgctctgtcattatgaatccatttttctgtacctgctgctctgtttcggtgcccgcttccccatcacttgcagcatcacatattcggttcgacaaatctaactcatccggcttcagctccttctccacatccaccctgaaaagtgcaatggatatgtactctgccagcatctgaaatgtgtaatccgtaaagatgatatcaaagcgtctctccacatgatgtatcatgtcaaccgccatcgacagatttacgcttctgaaattattggctatcacctcggccgcgcgtcttgaaagcctgtggtcatcggtcttgataacctgcttatcactgattggatatctgcagaaatgcctcatggcttttctgatatcaagctcactgcctgtcgcatatattccgtagcccgccgttctgtgcaccttaatgccaaagagcacaagctctgcgtcaagctcatttatatcatccatgatgacattcttgctgacgtttaactcctccgaaaaaagtgcatacgtgtatgtatcccagccacttagcagaatatatgatatgtagttctgtcgcttcttctgcgatactgctgccgatttccgccctgccacatccagaatctttcctatctgcgcatcgctaaagcacggcttcatgcctttgcccggctttctgtcaagcgtcatagagttttgctcacaaaaatcagccacctccttcagatatgtcttcacacttcgctccgacatacctgtggacgcggcaagagcctttgatgtgacaagctcattgttgtgctctgccagcttttcaattatcaatagtcccttttctgaaagcataaatcaaagttctcctgattatacataatttaacaattcgaccggttcatctatcagatttgttgcaccatgctccttcaaaaactctacatcacgaaatccccatgtgacagatacgcactccagacctgagtttttcgctgtggcgatatccacatcggagtcccccacatagatagcgtcctctgcactcacctgaagctctttaagtgccttctgcaccatatcaggtgccggctttttacggatgccttcctcctccatctcgccgactgccgatgtcatatactccttgaaatagagctgattgagctcctttaccgccgggtcaagcttgtttgaaacaatggcaagctttatgccgtttaatttaagctcctttaaaagctccatgattccatcataaggtgctgtattgtcattgcaatgagcctcataatattccttgaaatccgaaaatgtcttttcaaactttggattgtctgctccgtccggcactgcgcgctccatcagaagctttacaccgtttcccacaaatctgcgcacctcgtcgagtgtacgctccggcatgccattttgtttcaatgcataatttgttgcattttttaaatcctcaagtgtgtatagaagtgttccatcaaggtcgaaaacgaccgcttttttctcagttgtattgttgctcattatgttacttcctctcttgcttcttttttaccgttcttctcagtgtttctgaataattacctttttatttcaggtacggaaacagcagcgaacttctgtccttctcgtcaaacatcgaattgtactgcaggatattgtatgcctttatccattttgcctcgtctcctgttgcgtcatccacatgcataaaacactcattctttttcgaataatagccccttgaatttatggccggaatcttctccatcagctctgcgaggaaccggttgtatgccggcagatctatgttggctctctcaagcgtcagtgtggacaggtagttgaggctcgtcacatcaactgtctgtgcatccgtctcgtaattggtccatatgaaaaacggcaccttgtacagattctcaagctcctgctccgtaagtccggaattgcccttgccatttaaaagcttgataaaatcattgcacagccccggctggtggtctccaaaaaacacaatctctaccggatcatcaacacccttaaagtatgtgatgagattttcgagtgccttgtcactttcattcaaaagtgacaaatactggttcgcatcggtgtatgacgctccaaccttgtaaacctcctggttgaagttgtcatatctctcaccgtagccaccatggttttgcatcgtgacacccatgatgtaaagcttctcgtcatcgctctttttctcgtagcggtcaataatcttatcatagagctcctggtcagtgatatattccctgagtatctttgtctggtcaaaatcatctataaagtaagtctcatcatagcccagatgcggataaatcttgttcctgctccagcctgtcgcatagtacggatgcatcgcaaccgtcgtatagccgatattcttcaggtttgagactatggaggtcgggtcatcatttatatactgctgataaaccaccgagccgtccggcagaaatgccatcgagtttcctgtctcaaattcccactcagagtttggcgtcttcgcaccgtacacggacgaaagagcatagcctttaagcgtattttcactcagagaatccataaacggtgtgacctgcgtgttggtctcaaaatctcccaccaccgacaaatcagcaaacgactcattcatgataacaatgattgtcggatttttcgcatcagactgcgaatatgagctgtccgtttccttgaaattgcccgctatcttgtcaactgctgccttgctgtagccatcaggtgccttcacaaagctgtcccttatgccgagcacaaagttcagcagatagccgtttctgtacgtgccctttttctcccaggtctcggtgttcagtgacatggaattcatgatgacatacagcacgcatattattgtgagaagaatcgaaataattctcatatggatagcagactcgaactgcacttctatacgtcttaccagcatgatatacaaaacagccgccagaatcacatacaaaaacttgtagtctatgacgaatttgtattttgtcacgacagaaagtcctgttcccgctgacttcaaatccgcatacgtaaactcattgccacggaattcatagacaaaataatctataaatccaaacgcgagtatggcaattgatgctatggtacatgtcagcctcgtgttgtttgtgataaaaagtatcgccagatatatggcaagcgccagaaccacattcacctcgcataccatatcggtggttttcgcaaagtcctcatccgtcagcagcacatactgcaccgaaaaaacagatagtatcgctccgatgacaagcagtatcgcagcccaaagccacgacagcttcaccggaagctcaagcttcacatttacaagtccaaaatatactgccgcaaacaaaaggatcacccaccagcttgccgatgtaaagtaacctaccagcgcggccgccactgctgcaattccaaaatgtatgttgttttgttttgttatctcaaatttgatgctcatttctgcctcttaatattgcctcttaatattgcctcttaatgcttcctcttaatgtacctcttaatgctttctcttaatgttgcgatttgattttaaaaatatttcctaattagcaaagaagtcctcaatttgactgtatataatgtgcatcagatttgttcttgcctcaacgcttgcccacgcaatatgcggtgtgataatcagcttgtttgaatcctttatcgcacggagcggattatcctcactcataggctcctgcgccagcacatcaagacctgccgctgccagctctccatccataagcgcctgtgccagatccgcttcattcactataggacctctgccaagatttaaaaatatcgcagattttttcatcttttcaaacgcagccttgtccatcagaccaagtgtgtcatctgtgagcggtgcatgcaccgacacgatatcagacgtggcaagcaaagtatcaaaatccaccctctcgtagcccggctgcgaatttcttcctgatgtagaataataaaccacatggcagccaaaagcctttgcgatatcagccacgcgtcttccgatatttccaagccccacgatgccccaggtcataccgctaatctggtgaaacacattggaaaaatgcgtaaacgacgtatcacccacatatttctcgctcttcacataatcatcataatatctcagcttctcaagcaggtaaaatagcagtgcaaatgtatgctgcgccacggtctctgtagaataccctgcgacatttctccattcaatgcctctttttgccagatattctttatccagattgtttgtgcctgttgcagtcacacatacgagctttaaattttttgcctgtcctatagatttctcatttacctcgaccttatttaaaacaatcacatcagcatcccttgtgcgctccgctgcttcctctgttgtcgaaaaatcatatttgacaacctccccgagcttgtcatattcggaaaggtcgatgtcgtcaccaattgttttggaatctaaaaatactattttcatggtttgtttcctctgtgctatatatttatttgttttaatttctatttttaggggacttcgcacttgcaggctgtgatggtgcgccagcatatggtatattcctcagaaatatatgaagtcagccacaaaaaatgcatccggatagtctgttttatcagtctgctttttatcgtcaccgaaggttaatggaactttgtggcagttcatatatttcttcggaacacaccatatgccagcggtaatgcaggtttgcgtgtgcgaagtcatctcaataattatctatatttatcaatgtttatcactatttattgttatttgacaattttaatctttatttgccaatgtttatgattactaaaaatacagcttgctttaaatactaacaaattacctagcataatagcattaacataatagtattagcgcaatttataaatgtaatcatatgttcatttcatacatataaatatatttataccacatttccggaaataaaaccactgtatcagtatttgattaaacaaagcttaagaaagcccgccatattaatgataaatttcatcaatatggtgggctttaactattctgtgtatctctcttatgttggcattttatctcacagaaaatttgtaatctgtctctgtgtggtatgtatcgccagcctttgtaacaggtgtactgaagttggtctcatttattgagtttggatagaactgtgtctcgaggcagaatgcatcgcggttattgtatttgactccgcccttgccttcttgtcccacgataaagttggcagtataaagctggattccgacacagtcggtgtatacctccatctgtatgccactctcaggagagtatgctgttgcgaccttttctactcccggagcggtcttgtctattgcaaaattgtgatcatatccacttccatagtgaagctgtgtatcatttgcctcgatatctcttccgattggtttagcctctgtaaaatcaaatggtgtaccctcaaccggtgcaatctcacctgtaggaatagccttggaatcctttacaggtgtgtaatgctcagcatttatctgcaatgtgtgagtgtatacgcttcctgatgcatgaccgttcagattgaaatagctgtggtttgtcatattgaaggtagttgtcttatctgcccttgcattgtatataatagcaagtgcattttcttctgttaccttaaatgtcacatcaacgactgcatttcccgggaagccctgctccaaatctgcatcctctatctcaaaggtaatctcatctgccttctgctccttaacagtccagaagcgcttagaaaaaccatttgagccactgtgaagactgttctcattgtcattagcctcaagcttatattccactccatcaatattaacctttgcatcagaaatcctgtttgcatatctgccgacagtagcgccaaaatagcagtactccttctcatatgactttacgttgtcatatcctaaaatgacatctctctcattgccatccctgtcttttacaaaaatagatacaactgaagcgccatagtctgtcaaaagtactctcactccactgccattgctgatttcgtaaagcgatgcctccactccttttgatgttgtaccgaaagcttttttactcatgccccatatcctcctttagttacattatgctttttacattatgttctgttactctttgcttggtagcattttgattgcataatcgcgtttttcttattttacgcattcttttatattttacttcttttgatcgcataagtaaactttttcgtgcaaatatccgataaaatatttataacaattatttaagtgcgattatacgttcaaaataaaacctaaaataatagtaactgcatagttataattaaaaataataagaggattaacatgagtacatgagtaagttcagcaacaaatctttcagcaacatattttatgagaaattattattcaaacaaccgcgatgctatgaaatcatccaaacgcaaagaatatagtattacagagctcgtcgtatgatgattactacacatcactgcgggcaggaagcaatataaatctgacggtgtaaatctaacggtgtttttttataatgtaattttagcatttgaactgtagaatttcgactttgcaaaagaataattgataataaatgtatggctgtcttttcttaaattagagcaaaaaaaagacagccatcgttctgctgtcttttaggagaaggtattttactatggggatagtaaaaaatatataatgtattggggggtttttacggttattatagtatcaccttgacctctgaaagtgttaacaaacatgcacaaattttcaattattttttgtgcagttttactaattaaaatatgttgtccactatttaggagtaattgattttttgaacatcaaaaaaacagtgttcatttataatgagacatcggggattcagtctacgctccgcttcggtccgcgctgaacagacgtcccccggacgtctagcgccccgaccaactacgttgtccggaactcaattcacaatatatcaatagaaaaagaaaaccaccactcttacgagtgatggttttctttttctaatgagacatcggggattcgaaccccggacaacttgattaaaagtcaagtgctctaccacctgagctaatatcccataataaattaaaatgcccagttccggaatcgaaccagagacacacggattttcagtccgttgctctaccaactgagctaactgggcacaatgcttacgcatcgagttgcgggaataggatttgaacctatgacctccgggttatgagcccggcgagcttccagactgctccatcccgcgatagtattaagttactctataaagagtaatgggcagagatggattcgaaccatcgaagcaagttgcagcagatttacagtctgtcccctttggccactcgggaatctgcccataatacaattcaatattaaattgtataaagccgatgatcggactcgaaccgataacctgctgattacaaatcagctgctctgccaattgagccacatcggcataactaataaaagaattagttaaatgggacctacagggctcgaacctgtgaccctctgcttgtaaggcagatgctctcccagctgagctaagatcccacgcgttacttgtagtgagtataaaatctcactataaacgacccagacgggactcgaacccgtgacctccgccgtgacagggcggcgctctaaccaactgagccactaggccatataaaggtttgtaccttcaaaacttcatacaattccgatctgtttttctccgttattaaccagattaagccctcgacctattacactatcggtctgcaataaagttcttatataaaaaggtgctgaagactgtctgggatgatgacactgttccagctatgaaaagagagcgcaatcttcctgctgttctgtcccgcgatgaaataaatgcaatcattgatgccactccgaatctgaaacataaagcgattattgcaactatgtattcttccggattacgtgtatcggaggtcgttcatctccattatgatgacatttcccgtaccaacatgacaattcatgttcgtgaaaccaaaggcagaattgacaggtatacttagaatttgccctcatctgaagcctgctcaacagaaacggcaactgctactgtagcaccaaccattgggttattacccacgaaattcttccgtttaataatatatttcactatgtcatgtaatgttcagtaatgatttcaaattaacctattacacgctattacctaaatattattatgcttaccaatattattttttgaaatatgttattttctacaatgttgtcctgtcgttgactttgcctgattctgacattatcacactacacataacatcaagtgtctaacacgtttttattatatcatcaccatctttttttacaatactaacgcttatgaaatatactaataaaacaaggtcagtctttccacaccatgatgattccaagactgaccttaatgtcactaattcatattctgttgcaattcttttatgttgtccaaatcagacaaatccattccttcatatctctcaacaaaatctatcaatgttgatttacgaaccttcagactacctaaccgaagtgcaggtaatagttttctgttaatcagctcatataccagatgcacattcacccctaacaccgctgccgtctcacgcacattgtacaaaagcttttcgtcttttgaatagcatttaaatctgtgaaatacgctaaatacagactgaacaatttccaatatgtttgatcccaaatcaaagccttttcttcactcgcttttataatacgtggaaaaacataatttgtagaaatcattttttatttgtgctttttatttccgctaccagttcttcatacttacgttcgtcaatgatatatttccgtttaatcagtatataagcagctcctatagaaattaccggaacagctacaattccaagacgcaatataaatctttgtccggcatctgctgtctggataaatttatctgcctgtacaattacattttccgaagtaagttctcctgtaccagcttttatttctaatccggatattttctgactgattgcataaatattgcttataatcagtattaacgcaacaaccgcctgatcaactgcacttgccagctttgttgcaaaagatcttactgctgagataatactgtcatgtcgttcatgaaatcggacttcatcatactctatggtattatttaacatgacaatcatcgtcatattgaatgctccctgcgaaaagaagattagaaaaccgatgatattcagtaaaacaacactttttggtaaaatgtagcctacactcataaaaagcatatacccaatgaccgtaatgatggtagctgcagttataatctgatttcgtgtgaattttgaggaaagccacgcaaaagatgcctctgatatcagcgttcctaatccatacataattgtaaaccaaaatacaagactgccacctacagaatatccaaattcaaaataaaagaaattcattccaatcataatcagaagaccatttccgatttggaataataaacatgcaattccaatcactatcaactgatcatttctcaggaatatatgaaacatatcttttaatgacagtgttctcttcttttccggtcgttttctctcttttactccaaacactgtaagtagctggaaaccaataaaacaaaaagcaatcacaatcgcagccgtccgatatgccataatcgcatttccagctaccatatcagggagcagacctgcaacagaaaactgtccgatacagataaaaattccctgtacggttaccagccagttccgttctcccggatctgatgtaagactcggcagcattccccaataggcaatatcattcattgtgtaagtcattccccataaaagatatcccactccaaaaaatgcaacaaatccccatccttccggccttactgtaaacaagcagataattatcaggctgtttaaaattactcctataaaaatccaaggtttaaattttccggctttcaaatgcgaattttcaataataattcccatcattggatcattaatggcatcccacagcagacacactaccataattgctgatattactgcatattgggcaactgtcagtttcatcgtatattgaatatatgtaagaagaaacatagagataagtgcatacgccatatctcttccggttgctcctatacaatagctccattttgtgcgtttatccaatttattgttttccatatacgacttccacctctctctatttcttcagcagtcttttaaaagcctgcagatattttttatttgcattgtaaactaacatatcgattaacttcggagttgcaattccaccactggttgcaatcagtccttccagatttccttcttcgactcccatttttaccattttaaaggccgggtcccgctctgattttccccgaagtataatcttaagtccgatatgtacgactccacgaacaaattttccaaacattgagacatttaccacatcctgataggaatcgtaaaccgtatactctccacgctttttttctttgtcatgtttcggttcaccgcctaatagctgataaaattgttctgcactgatttccattccatgtggctgctctctaaaataatccgaaaacagttctctttcatttctaaaataactatttcctactacttccatattcgcctttaattgcaaatcatgtaccgatgctccgatacagatctgatatttgccgcttaacatggaaaaggcttttttctctacatcatagacggaaaaacttctttcatccagctctaatataacttctttttcttctcctggatgcagatatattttttgaaatccctttaattctatatggcttctgataacatctgattcgttcgggcagacatataactgtgctatttctgctccactcacctttccgatatttttaattttaaaaccgatttgtatctttccaccactatatacttccggtacattcaattccgaataggaaaaagaagtatatgaaagtccataaccaaacggatattttaccggaacatggaatgtctcatagtaacgataacctacaaaaatgctttccctgtattctacatcatcattcggaggtgcaaaatatctccatgccggagtatctttttctgaaaacggaattgtctctgccaatttaccggatggattcacctctccactgattaagtcagcaacagattcccctacagcctgtcctccgaggtacatgtgaagaattgctcctacattcttttcaaaactaaaatccataggcgcaccaccgaaactaattgctgcaatatgatctcttccgacagtttctgcaatttcagccaacagctcttcctgattttgagggattttaagatttttcctgtcgtatccttctccttcgtaagattctgtaagaccgataaaatatagaatcacacaatccttttttctatattcctgtttcagtttttctatcgtatcctgtagttgcttttctcctaattcctccgtttcattctgatatccctgtatataagttacctgatatcctttttcacgtattgcttcaatcgcatttgtcatcttcgtcggctggatatgactgctcccacctccctgaaaccgcatctgcctggcaagctctccaataatgattaccttcttctcttttccaattggcaaaacactattatttttcaaaagtactgcactttcattttccagtttacgtgccacctgattctgttcttccatatctacctcataattttcttctttatttttatgaagtgatacaaaattctgcagaacattcttagtccagttatccagttcctgatccgtaatccggccatccttatacgcttcttttaacacatctgtgtggaagcctttcggatctggcatttccagtgtcagaccatttttcatacagcttacaatatcatttgctgctccccaatccgacaccacaccaccttgatatttccattcttttctcagaacatctgtcagtaagtatttatttcttgctccaaattcgccattaatcctgttgtatgaagccattacagaagtcggttttgcttttttcacaacttcttcaaaagccgacagatatatttccctaagagttctttcatcaatctggctattggatgtcattcgtcttgtttcctgtgaattaacagcataatgctttaagctcgtacctattccaagactctgtacaccttcaatatatcccgttgccagctttcctgtcaaatacggatcttcactgaaatattcaaaatttcttccgcataatggagaacgcttgatattgattccgcagcctagcacaatggatatctgctctttttttgcttctttcgcaatcgcttcacccatctttttaacaatagcaggattccaactgcaggctattgcacttgcagttggaaaacaggttgctggcttaccggtttcaatatccccaaccttttcctgttccagttttcgaatcccatgtggtccgtctgtcatcataatagagggaatttttccattacagtcataagtatgccaatcaccaacaccgcctaaaagccgaattttttcatctattgttaactgttcacatattttatcaatgttcatctcttttcctctcttttaatctcttaattgcattttatctatttccggcatataattatattgatttatcgtgttttatgtcaatttatcgtgtttttgacaggaggaatcacctatgtataaaatgaagtcagacatcaatttttcactcacacatgaaatgttggaaaatgaagaaaatgaacgaatacatacatcttatgcacaggaaaaagcaattctcgaatgtgtttcaaacggagatattcacgcattggagaatacctattattcactcccaacaactgtctacggaaagatgacctcttccaattccaaattaaaattacttttttatgcaagtattgctaatacaactttagttaccagatatgccatcgaaggaggacttaatgaggaaactgctttttccttaagtgatgtatatatacgaaaaatggaacaatgtaccgatgttgacgctttaatgaaattaaatgaacagatggctattgaatttacgcttcgtgttgcagaagcaaaaaagacgccaaaaaactactattcaccagctatttctcgcgtcattgattatatctatcatggtaaaaataaaactttaaccttaaatcaactggcatctttagttaatttaacacctaaatatctgtctgccctgttccataaagaaaccggacagacgcttactgtttttatccataaagttcttattgaaaaggcacagaatttactggcacattccgactatagtctgggtgaaatcagtacttacttgaatttttcatctcaaagttattttatttctatttttaagagatacactggtataactcccggacaatatcgtaaaatgcatcgccagattagttggtaaaatagaaaataaaataagaatatcgatgattaaacgttactatcgccagaacttttctcgtcttgaagataaaagaatcgtcagtggtgacagtatggaaccggaatttcacagcggagagattgcgtgggtatcacagcaggataccctatgtgatggtgagataggtatattcggactgaacaatgaggcttacattaaaaagctgaaaagatatgcagacagactctatctcgtatcactaaacagcaaatactctcctattgagataaaagagtctgaccgtctggatgtattccgaaaagtggtcggcaaaattaattctaatgatgtaccagattaccggttttaatgaattataacgaaagaagtgattaaannnnnnnnnnnnnnnnnnnnnnnnnnnnnnnnnnnnnnnnnnnnnnnnnnnnnnnnnnnnnnnnnnnnnnnnnnnnnnnnnnnnnnnnnnnnnnnnnnnnnnnnnnnnnnnnnnnnnnnnnnnnnnnnnnnnnnnnnnnnnnnnnnnnnnnnnntggatatgatccccgcactatccgccgcgttgagctgggcgaatgctgtccgtccgcagaattcatgtttgatatgtccgactatttcggagtcccgatcgaggaaatatttgcacttgataaatctacagaatcagtacagagaggaaaataaagatgagcgatgcagaggtcaaagatttaaaccagataagtaagaaggatatctaccacactccatccggaaaatatatccagttcatccacgatcattcggaaaaacatttgatgcgtgggaactcctaccggacggaagtcatcggctactcgagagccagagcactactattgagacatttgatgaatttaaagaaaaaattataggtaaaaactaacattaatcgttattctttgcttattctaaactctaaaatcagaactgtagggacgcatgtggaaagcacgagccgggaatggaaagaccggtacaagcggggtaggagtacaataggtaaatccgttgtatgatccgaagacgtgatgtggagcgaaataaagtagcaaagcgtgtgagccatgtgccgagaaaagctgctattgtgtaatgcgtgcccgtaccgtaaaccgacacaggtggatgaggcatctccattatgatgacatttcccgtaccaacatgacaattcatgttcgtgaaaccaaaggcagaattgacaggtatacgattctgtctcaaaaaaatttagaccttctcactgagtattggtacaaatgtggtcgccctaaagatatcctttttccaagttcctggaccggtggatatcttgatataaccggtgttaaccagttctttaagaaaagtgctaaactcgccggcattacccgtcatgtttcctctcatgcgtgccgtcatagttttgccagccacttattcgaaagtggcacagatataaaatatatccagtcacttctgggacatgttgatcctcgctctacagatgtttaccttcatgtgagcaacaagacacttcttggaatccgcagcccgttcgacaacccggaaggtggtgaatcatgagtaaggattgtacgattcaggatgtttttcatcgtttttattcatcttttgaatccacacatagtatttctcccgctcagcgaaaggccgcttatcacatcatgaattgcaaaaccggcgcctttggtgtgaatgtaagcgtatgcgaggactgcggctgcatatcagtccactataactcctgccgtgacagatgctgtcctatgtgtcaggagtttccaaaagaaaaatgggtagatgcacggcgggaggatatcttagatgctccttatttccatgtggtttttacagttccggaagaactcaatcccattatctacagcaaccagaaattcttatacactgctctttatcatgcggcttcagatactctcagtgaacttgctgctgacagtaaatatcttgggactgatatcggctatatttgtatcctccatacatggggaagtaccatgaactttcatcctcatatccatgcgattgttcttggtggagggctggatgtgaaaaatcattggaaagacaatgggaaagattttttccttccgattaaggtaatctcaaaaacatttcgtggaaaatacatggctgaacttaagcagctctgggaaaatgacaggcttgaatttcatggatcggctgcaccttacaaaggaatggattccttattgcaagaaaccatttgacggtgccgaatctgtcatcagataccttggaaaatacacccaccggattgctatcagcaactaccgtatcaaagacatgacagaatctacagttacattttctgctaaagattacaaaaaccaagggctttggaaagaaaaaaaatatacagttatgatacgttaacagagcatatgtggttttggttttataaaatgttgttctgtaggcagaggaataatcttaccaccacaggaagagcacttgcatatatctttattataaagaagacggataatggcaggtgcatccatatctttcagcttggaaatatattttttgcaaccaaggatgtttctgcatagggtaatctttttcttcttatttctggatgaaagaagaccatagtgcctgatacgtacaaaacgttttggaggaacatgcattaaaaatcgaaatcgagtaggaggcggtgactaaccgccgtcctctcacagcaccgtacgtaccgttcggtatacggcgctttcaatagttaacgtgcacagactgataggctgtggctaaatcataaaagccactgtttatcagtctttctttattcagcgcccaaatcacagctttgttattgctgatataccaatactttctgcgactgtttgctattgttgacgcatagtgttctgggattccaagtttgactagatttttatatttcgttctaggtttcttccactgtttccatatacacatgcgtattctgtgatagagccatccgttgatgtcatctatgttgctcttcatacttgcaattccgtagtagttaagccatccccttgcatacaccttgattttctcaaggcttggcttgattgactgacatcgcttacgggaagataactccttcaatctggacttaaacttcttccatgacttcgaatgaactcggacataagtgccttttccgttccttcccaatgcaaagccaaggaatttaaaatttcggattgcaaacacgctgacagtacggctcttttctcggttgactgtaagtttcagcctcttctcaagatattttgtactgctttccaagagtctctctgatgctcgtctgctctttgcaagaagcacgatgtcatctgcatatcttatgcatggaacacctcttttcaggaactcctggtcgaactcattgaggtagacatttgccagcaatggtgatagatttccaccttgtggtgagccttcctctgtgtcaatgaccactccgttttccattacaccgcttttcagatagcgctttatcaactgtactacacgttcatcttttacattcttccggagaagattgatgagaatttcgtgattaagagtatcgaagtactttgacaagtcaaggactacagcaaatgtatagccttgttctgcatactccttaaccttaagtattgcatcttttgcacttctgttcggacgatagccatagctaccatctgcaaacagcggttcatagattggcactaactgttgggttattgcctgttgaagtgtacggtctatcactgttggtatgccaagctttcgcacaccaccatctggtttgggaatctcaactcgtcttactggagacggagtatactttccacgataaatgcggtcagttatctcttgttgatgttcctttagatatggaagagcctcttcaatggtcatgccatcaattcccggcgctcccttgtttgccttaactctcttatacgctctgttatagttgtctttatacagtatcgtttccaaaagtctcggctgtgcactgtctctttctttccatatccgattgaatgacctggacgctttcacatacccttcatgttccgcattatctctttgcgaacagccattgttttcaatgttttctgccatagacggtcattcctcctttctcggtcatactcaagactcctactgattcggtccttcacctctcggctactatgacctctgctgacttctatgcgttcagcattgctttattctgctcctttccttgttggaaagagccttgatatgacttgtgttcatcataacacatacaaggctcatttgcattagatagcgtccaatttgtcaataacctgttcaaactgtcggcgtttaatctgtatgcggttgccattcataatgagccagccagcgtccttgttttcctctgccaagcgatattcggccgaaaggattcccacctttctctcgctactcattccggcattctctcttcttatccctccactgctccttccggtacagcttcgtcggtcttaagaatgctcctctaccactcgcattgcgagtccacggtttcggtgtcgtgtttcagccccggacattttcggcgcaggaactctcgactagtgagctgttacgcactctttgaatgtaaacactacttattctggaggttttattatgtataaagatatttttgaatccatccgcaatgaagcggaaaaacgtaacctgcgtgaaagaactattcaactgtattgctctgatgtcggttactttcttcgttggattggaaaaaatgtttctgatcttacgcttgaagatgcggaaagttttcttactgccaaacgtctggaaggaaggtctcctgaaactcacaattcatagctggaacagtgtcatcatcccagacagtcttcagcacctttttatataagaactttattgcagaccgatagtggttgtgagtttcaggagaccttccttccagacgtttggcagtaagaaaactttccgcatcttcaagcgtaagatcagaaacaaaaagttgatctcagtcaagttaaacttggctaattcgttcattcagataattctgaatttactgttttaaaggtcttcaattttcattgaagcgttctgattgattctcaaaatctttcaaggtttctcactgttcagttatcaatgttctttgttttgctctcttgcgacagcttgtttattttatcaaatcactgttcgtttgtcaagcacttttttcctaagacaaagagcggaactaggcaagtgccattaagcaaagaaacgatacaggcatttcaacgggttatgaagaaacgtccaaaggcagaaccatttgtgatagacggacggggcaacttcttatttgtcaatcccaaaggcaagccaaaagttgccattgattacaatgccttatttgtccgcatggtaaagaaatacaacaagcaccacatggacaaccctttgccacatatcacaccgcatacgctacgccatacgttctgccaccctctgtgagccattgctgtgtttcctcaagggaattttgctgttttggtacttgcagtttcaagacttccacagcccctaaaaagcgttcccaaaaccgacacgttttccatctgcttttattactttcatttctgtttggcacgacaaagcgtaggttgtttgccaataacccgaaagccagtttcccaagttccagcggtctgtctttgaatgtcatggcaaagacatgagccttatcatcacgcagttgcatttctgtccgtttccaactgccgacttcattaagtgtcttattatgttttgaacatacttccttatccttgtcataaaagcggtaggacaatcccgatttaccagcaccgatataaacagtctttgcggtgtcgaaatcatcaaacttgctttcatcaaagtggtagccctcactattcgagataaattcctctttttcgcatttcttctttatctgctctatggtaaagaatggcttttcgttcttatcatcaatggcaatatcaagccttgtgaaatggaaattatccagtccgtatcttcgctcacaatgtttgaacatatccccaaaggtataattcctactgtcgagaatacggaaaatatcatcacaacctctgccggtcataacaagataacagcctaacccttgtgggttgtcctctgtctttcttgcgtcccccgatacataaatatctccaatctgccagcgtgcttgataagtcttgaatttaacgcttgccggatagacattgaaaatgtcagtcggtaaacctaaaatgtgcatgatgacatcttctgcggttgcggtttcaaatacaatgctgatgtaatcaatcttaacggataaattttcgtgtgttgcgatacttcattactcctttcgtatgccccgattttttgcggggtataaattgcattttttcctttatttatcacagtttctaggtactatgacatgtatacgcagggcggtgttacatatacgccctttatcagaccgaaaataaggtttctgactggggctgttccgtttagccacgagccttacaaggctcgtgagcgttaagaacggatcagacacaggaagaaagggaacgcctttaggcgttcataaagggcgtatatgtaacaccgccctgcgtatacatgtcatagtacctagaaactgtgataaataaaggaaaaaatgcatggatctagcgtttgattgtagttgaattttttgttttttttatgctaagtaggaaaaatttgggaagttagcaataaagtgggcgacggaatgatgttcaagatggacttcgatcctagaatcataggcaataaggtgctgccaaacggaaagaagaaaaccggaatcgggcagtttatcaggaaaacaagcctggatgaattcccacaattcttcaatatactagttggagatatgagtctggtaggcaccagaccaccaacactcgatgagtgggaaaagtatgaaccacaccatagagccagaatgtcattcaggccggggctgacaggactttggcaggtgagcggcaggagcaatatcacggactttgaggaagtggtgaagctggatacccagtatattagggagtggagtgttaagaatgatttgaggattatttttaagacaattacaggcgtattaaagagtgatggagcagtttaaagacgtgaacagacgaaagagtaagcataaagaaaaacttaatattgctatgtttggtcaaaaaagaattccatcaagagaaggcggagttgaaatagtggttgaagaactttgctcaaggatggctgcacaagggcataatgtgacatgctacaacagaggtggtcatcatgtgagtggttctgaatatgattcaaaacgacttaaagagcttaaagaatataaaggaattaggcttaaaacagttccaacaatagagaaaaaaggtcttgcagctgtttcatcatcattttttgcagcattatgttgtgcttttggtcggtatgacattgttcatattcatgctgagggaccggcatttttcgcgtggttgaaaaaactatttggtaaaaaagtgattgtaacaattcatggattggattggcaacgtgaaaaatggaaaagtggatttggttcaaaatttattcatcagggtgaaaagaatgctgtgaagtatgcggatgaaattattgtgctgagtaaaggcgttcaagattattttgagaaagagtatggaagaaaaacagtgttcattccaaatggagtgaatagaccaaaaatccaagaagctgaattaattacagaaaaatatagtttggaaaaagattcttacatattgtttttaggacgattagttccggaaaaggggattagatatttggttgaggcatttaagaatgttaagactgataagaagctagtaatagcaggtggttcaagtgatacagattcatttatgaatgaattaaaggatctggcaaaagatgatgacaggattatttttacaggatttgttcaggggcagatattgaaagaactatatagtaatgcttatgtatatacgttaccttccgatttggaaggaatgccactgagtcttttagaagctatgagctatgggaattgttgtctagtttcgaatatcccagagtgtacagaagttgtagaagacaaggcattggtatttaaaaagtcagatgttaatgatttactcaccaaaattcaaaaggcatgtgaccatcctgaaatggttatgaaaatgaagaatcaggcagctgactttatctgcgagaaatataactgggatgaagttgtaaaggaaacgatgaaactgtacaggagataataatagatgagagtgttgataataaataatctcctataaccgaacgcaggtagtgagatgtacatagtggaaaagcctgaaaaatagcgtagttacggcattttttgagagataggtgaagttgcaaaagcggtttttatctcgctacctaggttcagcaacagcagatgattttatcgtaaggactttcagtatcactacctgcgtttgtatggagcactctggtttatgaacaatacattggaagtgtttcatctgaacagaggtagtgaaataaaacatagaatataacggttgacacttgaattgctgagaaaatatttatcagcagaaagacagtacgtaactcgtattgtgaaaagaagtttataaggagaaaaggcaatgataagaattcttcattctgtcagcaatatggatcgtgctggtattgagacgatgctgatgaactattatcgatatatggataagtcaaaagttcaattcgattttttatgcaataagaaaaaaccgggagcgtatgacgatgaaataaaatctatgggcggtagaatttatcatacaccgggattgaatccggccaagtatcctgtgtacttgaaatacatgcgagaactgtttcaagaacatccagaatataaaatcgttgaggcgcacaatggggcactgggcgtgtatgcacttcatgctgccaaagtgagcaaaattcctgtgcgcatttttcatgcacatggagcaagcataacgaaagactggaagcttccaatcaagcttgtttgtaaggcttgccttcccacaaatatgacgcatcatttttcttgtggtgtcgaggctgcaaaatgctattttggacaaaaagtggtagatgaaaatgactatgtgctgattccaaatgcaatagacgtcgagcgctttatctataacccagaaattcgtaataagattcgcaaggaaaacgatctggaaaacaaacacgttgtggggcatgttggacgctttatggcgcaaaaaaaccatacattcttagtggatatttttgcagaggtcttaaaaattgattctcaggcacatcttgttctattaggcgatggtgaactgatggatgaaattaaaagaaaggcggcagaccttggtatcagtgagcatgtaaccttcgttggaaatgttggaaacgccaatgagtggtatcaagcatttgactgctttgttttgccgtcaatctgggaaggccttccggttgtgggcgtagaggctcaggcagcggaccttccgtgtgtcttttcgtcagccattacaagagaaattggattgtcacagcacgcaaaatttgtcccgcttacagaatcggtttctgtatgggcaaaaacactgagtgatgcgttgcagcagaatgagcgtaatgataacacgaagttgattacagaacaccactataatattgcctttgaagcgaagaaactacaggagagatatttacaacttgctggagaagtgaaatgaaaatcggaatattaacacatcaatatatcaacaattatggtgcttttttacaagcgtgggcactaagagaagcaatttcagaactatttcctgaagatgaagtacagattatagattatgtaaacataaaacattatatcatcaatgccggggggtggtttcgattttataaaaatagagaaacgctgaaagaatggtttgctaagattcatcttccgaacacttttgcgaaagcaagaaatcaagaaatggtcctttccaaaagatgttttaatgctcgacagatcaacgaattagcatttgactgcattgttgtcggcagtgatgaagtgtggaactacagagatacaaagggaaatgctgaacttaaatttggtgtaggattaacatgtaaaaatttgattgcatatgcgccgagtgtaggaaagacggcagcggatgaagcaattccgcagtatgttattgatggtatcagaaagtttaagcggatttctgcgcgagatgacctgacagagcagctggtagaacaggtaacagggaacgcaccgaaacgagttttagatcctacttttttggccgaatttccacgggcagaattaaaagcaaaaagaaagccgtatattctgttttactattgcgaaaatctaccgaaaaatattttaaatcaaattttttattatgcaaaagagcatggtttggcggtttatggcgcgggtgaatgcgacaaacgatattcagaagttactgtaaacctgacaccatttgagtgggtggaaatgttccgaaatgcggagtttgtgtttactggaacttttcacggtgcagtattctctattctgaatcgcaggcagtttaaggtatatctgacaaatgaaagccgaatcaaaaaagtaacagccttgctgagtgaacttcagattacaaaccgccctatcaaagaggatttttgcttcgatttagaaagtatgaagtcggaaatcaactatgaaaaagtgtatgatgtcatagaacagaatcggcagagcagcaagcagtatttaaaagatgcgataggaatggcaaaaaaatgagaataggaattttaacacatcattacgtaaaaaattatggtgcattccttcagatgaaggcgatgtatgaaacacttcggagactgtacccgaaagcggaaatcgtagttgtaaactatgtaaatccaaggcattggcggaagaacatcattcacattcttcatttcagatttggaattgacacacctgctacttatataaaaaaaattcagcaattgcagacgttcacgaaatacgaacataccattcctcgtacgcactctgtaaaaagtgcagaagaaattgcgacgttaaaactagatctaatcgtgttgggaagtgatgagatctggaatttgtgtggttctggatatcatccattaaaattcggaacaggtcttgaagaacaacagacaattgcttatgcaccaagtgtgggggctgtaacggaggatacagaggttccggcagaggttgcctctggattgaagaatatcgaccgcatttcaggacgtgatacagaaactgtaaagtttattgaaagagtttctggaagaaacgcagaaaagatgcttgatccgacattcctctataactttgatgcagatattaagaaagataatattcagctgaaaccatacaaatatatattgatttatgattgtaaactgacaccttctatggtggaggaattgaaacagtatgcacagaataacagcttgaagatcatcggcgcgggtgattataaaacatattatgatgaaggatttattaatctgagtccttacgaatgggttgatttgttccgaaatgcggaaaaaataattactggaacatttcatgggacggtattttctatcaagtatgaaaagccggttgtatgttatccgactgaaaaaaatcgaatcaataaaatacattccctgttggaagatatgaaaattccatcaagacttcttgaaattggaagagaaaaagaactgatcaacatgctgaataagccgatgaactatatgcagacacaggaatacatcgctagaaaggttcaggaggcggatgaatttctggtgggagaaaaaagatgagcgagattattctatacaaggataaaaaagaatgttgtggatgtggagcttgtatgaatatttgcccgaaatcggcaattaaaatgcaggcggatgaatatggatttatctatcctgtaattcagcaggacttatgtgttcagtgtggagcatgtatgacggtttgtgggtaccagaacaaacccaaaacggaagaacctaaaaaggtttatgcagctgcctctaaaaatagtgttttgttacggaagtccgcatctggtggtgcttttgcagtgattgcagaagctgttttgaagaacgagggtatagtatacggtgcagcactccctatggaaaatggaatactggaaccgaaacatattcgcgttgattcactggataagctgatcttattacagggttcaaagtatgttcagagcgaaattggagatacttattcgcaggcaaagcgggatttgatacagggaaaagtagttttattctctggaacaccctgtcagattgctgggttaaaaaaatacttgaaaaaagaatataacaacctgattacaatagatatcatttgtcatggtgttcctagtaagagattgtttcaagattttatagaatttcatggaaaaaaacttggtggtaaaattactgagttctatttcagagataagaccaaaggacagggaatgatcacgcggagcgtctatgtgggtgaaggacatggatttaaggaaaaagtgttgatgggcggatgcactgcatacattcattttttctctaagtcctatacatatcgtgagaattgttattcctgcccatttgcatcagaagagcgtgtaggtgatttgactgtaggcgatttctgggggttccatgaggaatatccttcatatgatgtaaagcagggactatcaaatggaaaaggaatctcttgcctattggtcaatacggataaaggcaataatgctttggaacagtgtgaagatcagtttgtgctgatgacttcggattttgaaaaagttgcaaaacataatgatcagttgtattctccgagtaaatatagtcctaagcgtgaggaaatcttgaaactgtacaaggaaaaaggttatgaggccgtggatcagtatttccacaaaacctgtaagaaagatattgtaaagtatacgatttctgggatggtaccaaaaggactaaaaagaacaataaaaaaagtgatgggtagaataaaacgataaaaagtatagaatacaggatggaaagaatgcgatatggagtaatataactatgatatttttgattgtttttatattagcggcaatttgggcggcatcgagaggaaataaaaaattcattatattttttatggcattttacccgatattgccggactatttttcaattgaactaggtggaggtatgcctcttctgaaagccagcagaattttgttgctgatacttcttctatgtgtatgtttccgaaacaaaaaaataatactaattaggaaacccttgaaagcaactggcctatattggccgttgattatttattttgcagcaagaattttggcaaacgggtattatgtttcaagcttatctgatgcaatcaatacggagtttacagtcattgttgagcaactgatactgattgtcttgatttgtcaaattatacaggatcaagaagatgtgtatctgtgcgtgaaaacaatcgtagatgcaagtggaataatagcagttatcagcattatcaatgttctgattggctcaaatttgttttattctttgaatacggtatctcggaatgttttaatggagtctacggtaagaatgggcatcattcgtgcagaagctacatttgggcatccggtatactatgcaatgtattgtgcgcttattatccccttagcattgtatatgtggcaaaatgaaagaagaaggtggaatggatgtatccttggtctaaatattgtcgcagcattcttaacagagtcaagaggaacaattgttgtactgcttgcgttgcttttggtgtttatacttattacagataaaaaaacaagaaataaaattttttgtgcaggttgtgtaattgcttgtttggcggtgttcgtttcttttgcggtgccgactgtttcacaacaatttacaaacataattaaatcaataatcattgcgtttggagatagtggagaaacaattgaaaattttggcggaaattcttcaacggggctttcgtcaagaatgatacagttatcgggtatttcttggatgctgatacataatgcagtatttggactgggagcaagttgccatacaagggggaaattaagttatcgtataaatggagtatggcaagtaagagataccattgacaacgggtatgttggatattttgtagaggaaggtttgttaggtggaattgcatgttttagcttattctactcgcttcttaaatcttcttggaaaaaagcaacattcaaaaattcaagaaacatgaataacagcttttttctctgttttgtgtcctatgtggcggtaatgctgtctgttgctgatgtatcgcagttgctttgggtaattattgctttatatataacatataatgcgaaagcacaagcaattgcaagcgaataatttgagaggtgtagtatgtgtcgatgcttaatattattatctacatataatggtgaaaaatatttaccagaactattggaaagcgtactagcgcagaaggacatatatgttgatattcttgcgcgtgacgatggttctacagataaaacggttgaaatattgaaaaagtatgatagggttaaagtttatggagggaataatttaaaacccgcgaaaagttttctggacttgatttggaaagcggatataaattacgattattatgcgctgtgtgatcaggatgatgtatggaaagaagaaaaaatcatttctgctgtaaaatgtattgaaaatatagacaagcctgctttatacagtagtgcagttgaagtggtggacaaagacttaacatttatccgaaaatcgtttacagataatacatttaaaaatccattgtatgatattctgacatatggaacaccaggatgtacatttgtgtttaataaagcactgatggaaaagctgaaacaatacaaaccttcagtaattagtatgcatgatagctggatcagctttgtgtgtcttgctgtgaatggctttttttattcagatcagaatgcctatatcatgtatagacagcatgatgcaaatgttttgggagcacaaaggcattctctgaaagatacactgagggggatcattaaaaataaaaatgtccttagaagtgatatggcgaaggaaatactaaaagggtattccgagatgatgccagaaaaaacaaaagaagattttatattttttgcagaatacaaagataatttgaaatataaattgaagattttgatgctcccgtataataaaaagaaaacaaccaagagaacatttgaaaaagtaaaacttcgaatcgtgtttaatacgatataaagtggaattgaagattgagagcattgaatcttcaaaaaataaaggaagagaaagtctacaatgtcaacatcactgaaaaaaggactgatgtacgtccttatagcaaattttatcaatttgggatttaacctgataacaaattttgtccttccaaaggaattaagcgtggaaagctacgcaaccataaagacatttcagctttatgtaagttatgccggtctgttccactttggctttgtcgatggaatgtacttgaaatacggagggaaaaatgttcaagatatccgaggagaagatttaagaacaaatctttctacactgaggttttttgaaattgctgttacgattatttgtgcttttgtcgcagttgttttaaagcaagaagttttggtgttttttgcattatcgattctaccgttgaatctggcaaactattttaaacagctataccaagcaacgggggaattctctctttacgggaaaatcatgaatgcaaatacgattttgatcttttttgcaaacatgatgtgggtatacttaattaaaacagataatgcacaatgttttctatttagtaacgtcattgtgtattttatcgtgtggattgccttggaattgaattgcaaaaaacttgttgcaggcgagcatagaggaacttctttctctttaaatgagttagtaaataatattaaaggtggtattttgctgacagtcggaaatttgtcatctgttgtgcttacgagtatggatcgatggtttgttaaggctttgatgactacgttggcatttgcacagtattcgtttgctgttagtatggagaactttatgaatgttgcagttacgccagtgactacaacattatataattatttctgtaaggccactgataaatcacagatacgaaaaacaagaaattatgtaatggtttttgcagctgcaattgtttcgtgtgcttttcctgcaaggtttattttagagatatatttgacgaaatatattgattcagctaaagttatgtttttgctttttgcggctcagattttttatattgtcataaaaagtgtatatgttaatttgtataaagcacagaaaaaacaaaatatttatttcataaaactaacgatgattattgttgtaggatttatatttaacattgtctgctatggaatctataaggttaaggaaagttttgcagtagggacactgttatcagcaatttgttggtattttctatgtctgcctgattttaaatggatggaatacaataccaaagagaaattgtatccttttattcaaacatgtgcctttttggtgtgtggattttgttttagtgcagttcctggatttttaatctatatttttgaaatcgcagtagtgtcttatgtttcatttccgagagaagtacgtgagttttcaactaaggtgaagattcgtattagtggtttgaaacgttaagctggaaggataaacatgcataactactgaatatataaatgtctttctgttatatagtactttagctgctttttgcacatttgaacttggagtttctgcttttttgcagacaaaaaattggattttaagagatgagaataagatgacagaagtaattaagatactcaataatattataactaacgtactgactgccctatacagaccatgtggcttttcacttcttttgtcttttttttctatgtttttttacttatatgcgtatcgaccaattaatgttggaaagggatggaaggctgcaattattgtgtggcacgatacttttaaggaatcagcgttgttccgtaaattgtttcttttgtgttttgttacttcgctcattttatttaagactctcctaaatagagatctatggatgaacccgttatccaacgttatgggaggttggagcatttgggaaacagtgaatggaaaaaagaagcttacaacagaatgtattgagaatgtgattatgatgatgccatttagtgctacgttgatatggacatttggagaaaggcagaggatgatttggaaaggcataaagataactttttgtctttctgtatccatagaatttcttcaattgtttttgagattgggcacatttcagttatcagatatcttttataacacattggggggatgtttaggaagtgtaatatatggggtatgctggaaaatgataggcaagcaacaatgattttcacttattagacttttagtagaagaagtgaagaaacgaatgaaaggtattattttagcaggaggttcaggcacacgcctgtacccattaacaaaagtaacaagtaaacagcttttgccaatctacgacaaaccgatgatttattatccgatgtccgttctgatgaacgctggcatccgcgatattttgattatttccacaccgcaggatactcctcgtttcgagaatctgctgggagatggacaccagtttggtgtgaatctgacctatgcggttcagccgtctctggatggactggcacaggcttttatcattggtgctgatttcatcggaaacgattctgtggctatggtgtttggctactatgtggacgatccggagcaattcggtattgttgagttcgacaagaacggtaaggccatttctatcgaggaaaagccagaacatccgaagagcaactactacgtgactggtctgtacttctatgataaccgtgtagtcgagtttgccaagaatctgaaaccgtctgcccgtggtgaattagaaattaccgatttgaaccgtatgtatctggaagatggtactctgaatgtggaattgctaggtcagggcttcacttggctggatacaggtacacatgagagcctggtggatgccaccaacttcgtaaagactgtcgagcagcatcagcatcgtaagattgcttgcctggaagaaatcgcatatctgaacggatggatcagcaaggatgagctgatggaagtctatgaggtcatgaagaagaaccagtatggtcagtatctgaaggaggtcatggacggcaagtatcaggaacatctgtattgataaaagaagaaacaacgatgaaagaaacgattgatttacttggaaagatcctcacaaatatcctgactgctctctatgagccgtttggattctcgctcctgctttcctttttggctatgtttttctatctgtatgcggatgagccaatacatgccggcaaaggctggaaaaatgccatagtgacatggtatcacaagttcaaggagagtgtgttctttcggaaactattcttcatggcctttgtgacttctcttattctgttccgcacattgctgaaccgtcagctgtggatgaatcctttatccgatgtcatgggtggctggggcatctgggagactgtgaatggcgaacagaagctgaccaccgattgcatcgagaacgtaatcatgatggtgccgttttcagcagtagtggcgtggacgttcggagagaagataggaagcggctggaagaagatactgtggcaaagcggtaagatagcatttatcttttctgtaagtattgagatgctacaattattgcttcgcttgggaacattccagctatcagacatcttctacaacacagtcggtggaataatcggcggattgatgtattgtgcggtgatgaaggtaagaaagcgtctgtaaaactggatgaaattgtgatatactgggagtggtagctccctacgctgttctgataatcacatacctctccgtggtgagcagcaggcaacgatcttatggtcggcgaagatgtgagaaagatatagaaagataatgtggtcatgatgaagtggttgaggagtctatttgataaaaaagacgaagatgttattatatccagtgagggaaatatatctgaaaaaaatgaagtttatcacgtcaatatcgataatcacattgatattaagaaagatggggtgaaggaaacaatgggcaaaaatcctttgcttgatttaaaagagctggaattgagagatttaagcaaacatcaaattgacgctttggagcaatggtgtcgccgattaattgatgatattttcaagaaaaactatggaaattcatatattgatgctgaagtgcagccgggacaacctttaattaaagcaagcataaaacgaacaatagaagaaagaataaggcaagatccgaccagatttcctcgctggattgatggaatcgtgatggaggatttggagtattttatttgtcgagatgatttatacacaagctattttaaggggatttttgaaccgttttattcagtgcgtgaggaacttcgttctgttttgcaaagattgaccactatccgaaataaaatagctcatggtaatgcagtttctgtacatgaagcagaacaagctctgtgttattccaatgatattataaattgttgtaaaatgtactatgtcagcattggaaaagacagagagtataatgttccgatatttactagaattaaagactctttgggcaacgatcatccaagagcacgattagaagaatatccgtgggaagaacacttttatggaggaccgagatacgatggaggaattggggacaggcctaaaccaatttttcattcgggtgaatcttataaagtgtgggtagaagttgatggaagtttcaatgagaatacatacacagtttcttggaagtatgaatgtggtgaacataaaattaatgggcagggaaattgtgtagagatatcgtttacagatgatatggtttcttacccattgtatattcagttttctttaaaaacaactaattcttggcatcggatggcggttaaagattgtgatgatatattaaagatgaactatgagtgtatattgccgccagtaagtagttattaatctgatggaggtacacaacaatgcccagaacaaaaggcagcaagaacaaaccgaaggtagccaatgactacgcatcccagattgcagaaaagcaggagtttatcgcttccctgaacacagagatcactaccattactgctaatactgatgctctgaaagctgatctgagagggaagaaggcatcgctgaaggaagctgaaaaagagctggcctctttggaagcaaaaaaagcgaaagcggatgccaagtccgccgaagaagcaaagaaagctgaagcggaggctgtgctgaagaagctgctggcaagcggcatgagtgcggatgagatcctcgaaaaactgaaataaacatgaacccaataaaatccgtgtggacaaactgaacttcaggagttcatacggtattttttgaaggccttcgtatagtttataacgaaaataaaagaagaacaaaatttaaagaaatggagcgcgagaaaaatgaatttatcaaaaatacatcatattgcaatcatcgtatctgactacgaagcttcaaaggatttctatgtgaacaaattgggctttgctgtcatccgggaaaactaccgcccggagcgtaaggactggaagctggagctgcacgaatgattatgggagagaaaagagcgtataaagccagaaagcccggcggtggtcggaagaagctgaagccggagtacgatgccaggaagaacctgaaagagcagatggatgctgctgtggcgctttatgattctgagatgtccttgcaggccatcggcgaagaactgggattaaatccaatcaaagtaagaaagctgctcatcacggccggtgtgtatgaatctgaagtggcggagaaggtgcaagctacctttcaagaataccatgaaacacgagactacaaaacctccatactctcaactgcaaacactctgaaactttccaaagcctccgtcacctcgtacctgccatatcggaaaggtgtgtacttcccaagcacagcagaaaaagggaagatcagtgtcggagcagagcggcagcggagatacagagcaatgaagcggtggagggttgatccgacagaagaaaacttctggggcgtggttgtgtcctatgccggggtaggatttaaaacctactctggattgccattctcttacgaaataaaaaaaggcaggaacggtgagtacacgaaagagctgtggattgaccgccgggagaagagtaagagtttggcatggagttctatagttttggcgcagaagaatattaaaggagaagttgtagaccgcccgaaagctctgggcgatatcaggggagtgacttacatttatgggatgttctatcggtttggactgattgatgtgccggatgaagtgaaggagaagatgggacatccgaaaacccgcaaaaaataggttgctatgtacagaggtgtgcggtaatatgtgccataactgaggatgtgaatctcagttgggaaggatggtagcattatagaaaaattgaaagaaatgctggaggagtatttgaagaaatctgccctactaggcaatgtcatcttaacttaatgacattgcctagtagggcagattttttaaaatttcaaggtacggattattacatgcttacatataaatatttttcgggtttgttaagattttaattttaagagtagtattatatgcatatatatagtataattataacaactgatatcaatatatagtacatttgattgcgggagaaaatgattatgtatatatgtgaagaacttatggataaaatcaatagtaaagacatcaatacatttttaaaaggaattgaaatatctcctaatgatgagaagtatccaaagaatcgtaaaagaatgttcgaggagcttattttagagggaataattgatgaggagacactttcgagtttcttttatagaggaataatgtgtggtgaacatcgtcttataagagtatataagctgtctgagagatgttgcaatttgttaagaaacagaagctcttgggatgattttatgcatcattatgatgtgagtgagctacagtacaatcttattttaacgccattaaagtacaaatcagaaactgcaaaactggtttatataaagagttttaagagcagacttaaatcaaggatggcaagaattgatatgatttatgcttttaaaattttaaaatctaacaaagagacaagagcggtagaagaacttaattcatacttaccggtaacgattgatttgataaatcatgaacttattattaaggtatgcaatcaatcggggttattggagtccagtcgaccaaaaaaacagttagatgccgtgtttgatgaactgaaggctgatctgaaaatagagttgaacaagaacaaagtcagacctgaaactgtgctatatgatatgagtagagaactttttaataatttttacaggcagttacctaatataaaggaacttgatgagaaaagaaataaattgtgtagagttgtagatttgttattacaggatatcaaacttaatcatagccaaaaagaagcggatggcatgatacatattgatcccaatcttattgatttagaggatgagttatacaagcttctacagcaaaccgtattattggattatttggagactggagatctggaaagtctgttgccggatgatacgatatacatttccaaaattcgttttagtgatcaggataatctggaagcatcattaactggtgagaatggcaaggactgcatatatgacaagcgtacatttatggggattagaaattctctcgatattgtaaagcgtatagtttctatgagggtaatttttccacagaaaaagggaaatctgacagttaagtatgatggaactgatgataaattcattggagttcatattttagatagcagacattacaatcaggatgagttgaatgaagcatgggagctttatagagtgtatgaaagacaaagaattaataaagatatgctggcaaagagtaaaggacttaagtcatcggcaatataagaatctttcgttggaggagatatctgagctgctggaagtcgatatggaaactgcttcaagcgtgatatctcttttaaaggagcagggaattataaatgaaaaactgcatgtatattgtgatgaatgttcatcagagaatgtcatagagtgtgatggattttatgatatacaggatatcagatgtcatgagtgcggtaagcagattgatttagcagaggcaaatgaacatggaataaggagatattctatagataaagcaagtctggaagaacttgtaaggaatgactactatgatatttatgaaagctgtaagactgagcgtaagattattgaaatagatcataaactgcaggcggttgagccaactaaagaggtaattaaggagcgtgatactcccgacaagagtgttaatgagcggttatcagccattgaacgtagaaatagcaatgaagatcgtattaagagtatttttgggttttcattatggatagttgtaattgctgtattgactgtagaaattttagacttcctgatagatgtattgtattttaaagataatcataattttatctttagtacgtttataaaagctattaaaggtagtgtattggaaccctacactggtgaaatactaggaggagtgatagctgtgattggtgctatatatacattagcagtaaggcagattaagtttcattgggatgatattaagaattaatttgaactttaaaaatttattcattaaattgtttggtagatggaaacatacagatgacaaataaaattttgctattacaaagtagcaaggatagagattaatgaaaatgagcagtcacatgttgtaggcaaatttaatttggccgagtggctcatgagtatgaagagtaaagctctcgtacagcgtaatgtgaagctttccgattgtgttgtgaatttagtggaatattgtgaaatttgagatgggctttacagatataaaagagacgtgtaatttggaatacgtaaagggggagaaaacatggatttaaatacttcatcgttagaacacaaaatggttgataaactattaaatgaaaagcttgaatttgcaattataggtttgacaggaaaagttaaagctggtgtatcagatgtatgtaaattattgactgatgaaagcttttgtgatcgtgttacaaaaccagctgatacttcacagatcgatatgtctatgacaagagaacttattgtatgttatagatatctacatcataattggagaccgtttgtagagattaatgtaacaaatattattttttcatttattttggaaacggaaattgaagttttaaaaaatcaaaaatgtgctgattctacaatatacgatattatagatgatgttttgaaaaagaaagagagtcttataaataaagcttatgagaatttaaaaagaatagaaaaggctattggtagagacgatatctttgatttaagacgggtagacgaattatttaaaaaaatttttataagtgataatagggttgaagagctatgttcatcatggctcttttataagaatcaaatagataatgataattattttagacaacaagatgtaattgtattctgttatggttgtctggtttccattagtgagctttttgaaagagaattgagagtatatggatgttttactgcaatgtatcagcagtatggaaataatttaaggggatgtggaaaagtttatatttcaagcaaggatgatatttgtcctgttaatttgttttgcatacctgatagaattaacaaatttgtcaaaatgttaagacactgtggaagttggaatttgcaggatacagaaaagaaagataataaaagggtaaataatcgcgtttatgtcgtgattaataatttgaaaaatttgtttgaagctttttattttagatgcagatatgcttcgttttacttgcttgcagttacatgtgatgagagagaaagaagcagaaggtttaaaaagggattttcaaatgaagtatatgaattaaacgaaaatttgtcacttgggaaaaaaatatataaaagatggaaaaaaaatcctgagggtgattttagtgaagacgaaaaaatttttttgaattttgttaaggatgatgtaattcgtacaagatgttacgggaatggattagctgatttcattttgcaggatgttgtaaaatgtattgaagatgcagatttatttttaaagagaaattatagagaaatagattataatagtgatttggaattgatttgggcattgggacgaatggttactttgataatgcatccggggttgcttacacctacaaaagaggaacgatgtatgcagattgcaatgactgcaaagctaaattcaggatgcctttcaagaaaggtaggtgctgttattactgattcagaatataatattttgtcattaggatggaatgatgcaccatgtggtgctgaatcatgcattagacgtaatttatttgacttgataagaaattacgaccgtgatgcttacagtgaatatgagtgttacaatgatgaatttagagaataccttaacaaaataaattccaagattacagaagatagaaaaagtaatttaaatggcttgccatttgcattttgttttaaagatatgtatcaggatatattagctcaaaaagaccaaatatatacaagagctttacatggagaggaaagagcaatcgttgcatgtaaaagtgacaaaatcaaaggaggatatttatttactacatccagtccatgtgagttatgtgctaagaaaataaaagaagcgggtattaaaaaaatatattatattgagcaatataagggaatatcacaatcacatattataaatattggaaaagaaagaacagattatatacttttttcaggagcaactggtattgcatatgtacgattatatacacctctaatgccatataaggatgagttaaaagcatatggttatgaaccggcagatattcacaaggaagcaaaatatgatgtaaaaattatagatacaaagacaataaaagagaaagttattattacagatgaaaaacttatgggacaggagtgtcaggaagttcaggaaggacaggaagggcaggtgtaagcatgttttctagagatgatataaagaaggcaatatgcgaaggtcatttaaaaatatttccatatgatgaaagaaatataactggggctgggtataatttatctactatgaattttgcgttttctattagaaaacatattcttttaaagattaatgtggagactttagaaaatggaaatattcattatgtgaatattcctcctaatgacacagtactctttttttctaaggaatacatagaaacagataatgaaatagctggtatttttatgtcaaaagttgctagagtttgtcagggattgggtaatataagcacgactctggatcctatgtggaaaggtcagcttataatatctgttaataatccgactggcaaacacattagactggatttggatagagaacatggaaatatatttacattattgctttttagattggaaactcctgtgacgggtgaacatgtgcatgacaataataaaggacggtgtgacctgctaattgatcattttaaacgaaataagggagtattctttttaaataaaaagtatcttgatttgaaagagtttgtaattgatgagtttgccaattctttaaatggatatgataatttcagaaatgaggatattgaggactgttatacagaaagaatgagaaaactatgttatatagaagatagaataaagaaacatgtggttttgtttagggaaggtcgttatacagttgatgcagatataggaaattataagattctatataacagcgaagaggaaaaggaaatcaagagctgtaaactatataatatggataagaatactaattattggttaggaaaagaatactcattacaagatattcgaaatcagaaaaaagaattgattcagttgatggaaagttatattagaataatagattacgaattagatataattcgtcatgatcgacgtatcctatggcaaaatactgaaatagctaaatatgctaaagagaataatagagcatatacatgcagaaaagtgttggatatcatagtgggcgttattattgcgattggtgttgcatgtttagcacattggtttagttttttagttttcaaaaaactgttatcattaggtcttagcaataaagacatatatataaacatctttagtgcgggatgttcgttgattgtaggtataatatcaggaattgtattattattgattgaaaagaaaagacgttagttgttttgaactctcttattttgtccaatacctgacctcttgattgtccagccatagaccttatactgttcttactgatccacttggaggtacagagggcgatgttgcaaggtactataatgataacgcgacttattcctatcttgacagaggaggcaattttgcatattcacttcgccgattaagtcaatggattggtgttgcagatgagtcggatgtgtcatatgcccaagctggtgcaacaattagtggatcatcaatcgatgataaatatgcgtatggatatgataaagcacatcttgagaatgcatatgagatcaatataaagcagcagcctgatcaggttaaagaaatgatcgagcaaaacgcggcgaaagttattctctaataaagaataccaaccgacagcagcaagaacgtttcgataggcaagacgatgatttgtacgacgaactgtactttgacgacagcccgtattgacgcaaaaagtaaatttaataccatatttttcaaaaattgtattgacaactcagggatttgtaagataatagtggtgtggggtataactactatgaacaattatgaatttttagagaaactcggcttttcgtcaaacgaagcaaaagtatacggaacactaattaaacataaagtgttaaacggttacgaaatcgcaaaactttcgggcgttgcgcgttcgttggtgtacgaggttatcaatcgcttggtggcaaagggcgcggttattcgtatagacggagagccgaatttttacaagcctatcgagtatcaagaccttatatgtagcatcaaggaagaaaacgaaaagaatattgcctgcgccgaacgcgagctacaacaacttgcaacggaaaacgccgacgtcgattatgtaatgaatatagtgggcgaaaaaaaatacgttgctaaggcaaagaaacttatcgacagcgcgcaagcggaaatttcgctgtccatttggcgagagccgttcgaagtgctacgtagtaatatcgaaaacgcaatatcccgcggggtaaaggtgtatatttttacattcgaaagcattttggtcgagggcgcaacggtgtattcgtacaatatcaacgacgtttcaacactgtttccataccgtagaacaacaattataatcgacggcggagagtgtttagtcggagaagaaggcgatcgcaacgtttacgcgcatacgcgcaatcattcggttgtttcccttgccaccgacgaaattgttttgaatgttttttggaataaacttatcgaaaaagaaaacctgttgtctaaaggctgctctggcgcggatttcttgcaagccatacacaatttggcggagcgctacggcattaccgacgagatgaccaagaatttccttgtttacaattttcaaaaggagaaaactcaaaatggcaaaaaacgttgaacgattacaggcgcgcgaagccaaggaacttatccgccgcgaaaagcagttgggcgcaagaagcaacaagttttatttgatttatttgtttatgattttgtcgctcatctacataacggacgaaatcgcgtctactatatccattcagtttcaggcgaatatagttacagaattcttcgtaaaaaatatgggtatggaatacggcgcgggattatcgctcttttccgccataggttttatttcctatccggtaacactgcttattattttctatcgtccccttgcggacaaattcgggcgtaagccgtttttggttattaacacgttatgtatgggcttagggctgttccttgtgtatttatccaaagatatctacgtttacatgataggcggcacgttgatgggttttatggtctcgcacgatatgcaatgcgtgtacatactggaatgctccgacaaaaagtctcgcgcccgtaactacgcaatcgtaaaagcggtggcgatactgggcacgttacttgttccgttgcttagggctacactcatgcaaaacgtaagcgagcgttggcacgtagtatatttggtgccggcaattatcggttttgtaatgtcgttattcgcgctgctttttgctagggaaacaaacgcatttttaactaaaagaatagagtatttaaaaacgcctatagaagaacgtgaacaacgcagcaaggaaggacgcgaacaaaacgcacaaggcggaattctgaccgctgtaaaattcgcattcagacacagacaattgcgctttttgattattgcttgttgctgcttttatctcgcttcgttaggtacggcaacgtacagtacggtcatggcaaagtcggcgctgatgacggaagaagaaataactcttgctttgtttctgtatcccgtcggcaacgcgctgtttacattgatttccggttttgtgtcggataaattcggacgtaaagtaactatagtcgcaatgtcttgttcggcgttgacgtgttatttgctgtttatctttagcggtatgttcaagtggactccgtatttgacgggttttgctatcggcggatttatgggcagttactggggcgcaggcgataccatcggcggaattatgttttccgaatccactcctacaaacttgcgttcgtcggttacggtaatcaatacgttgcttaacggagttatgggcggacttgcaacagttattactatgatactgctgcctatcattcctgaacgcatgttcggctatatgtatttgggcttgacggttccggggcttgtaggggcaattgtaataatgtggctgtttgtcggcgaaactcgcggacttgatcttaaaactgtaaccggtacggaatgggataagcctaaaaaggttaaagaagaacaacaggatggtgaataaaatgaataacaaacaatttgaaatcggcgcaagcgaacagccgttagatattattaaggaaacgtgcggttttgcgggcgtttttaagcaaataggtgttataggggattctttggcatcgggcgagtttgaaagtcacgatgaaaacggaaatatagtttataccgatatgtacgagtactcgtggcccgccgttttagagcgcattactggaacaaaatacaacaattattcccgcggcggaatgaccgcgcgcgagtatgttcaaagttgggcggacacaaatggattttggcaatggaatcaagcgtatattattgcgttaggcaacaacgattcgtttgtgttcgggcatcctctgggaagtgtcaaggacgtcaacgccgattgtccgcaggataatggcgatacgtttttcggtaatatgggcaaaatcgtttccaaacttaaaacaatagagcctaacgcgcgtatttttgttgtaactcctcaactgcgcggtgaagcgtgtgataacgatatccgttatatcgcaagcgaactcgccaaattgtgcgatatgtttgagtttacttacttgctggatatgactgtgcatgcgcccgtatacgatgcagaaatgcgtaaatctttcgggttgggctttcatccgaacccgatgggctactatgcatacgcgttgattgtgggaaattatatcgattacattatcagaagtaacccgcaggaatttgctacgataccgtttgtaggtacgttgctcaaaaacaaagattacaaatagaataaagatttcaattagttcttttcaatattttatcaattaactctgacacagatttgacacagccttctgcatattgctttacagtagctggagaatgatggaatgtataaccatgctttgttgcccttaacatatcaatgtcattttcagcatcaccaatggcgtagatttgttcatgcatgaatccaagtttctgacaaaggatgttcatggcgttcccttttgaacagtctctacacgccatgtcaacatcctggatatttacaaaagctctcacctcctggtgatctgacttttccagccagtctgcaaaagcttttgcagatttattgtctttgaaatggaatgacattccataaagtttttccgtttttaataaatcaatactgctaataggtgttgttggcaggttgtactgctttttttgattgcatgaaaatacgttgtctttcgtatgaactgttaatggtatatccgatgcatattcgtttattatttttttgattgctgtaaatgatacaggttcttcatgcagtatttgttgatgactatccgcgataatactccctgtaccggcaatcatgtaatcaggcaaaagatatccttccaacggagcaactatccatggcaatgctctgccggagttaattacgatcagatttcctctttgctggaattcctttattgcatctaaatcagattccttaaaatatgtttttccattatcagagaacaatattgttccatccatgtctgtaaataaaatatttttctgtttcatattttttccctgctaaattgattgtattgttgcattatcctggaagctaaagtaatcagggcgatggcgtgactgggtatattcaaacataacaccatcactattgtaagtatgagaggtgacaacagccatacagttatagtctccaagatccaaatatttttcatcaatttcagtcatcttttatacggtcatgatacgtttacttgtgacaatggaaactccaagagtattttccagatagtcgtaaatcgacttttctgcaatctctttagttagatctttagcaacgcttttcaaaaaataattatggttttataaattttttccgatcctctcaagttcgttcatggaatccttgtttttttcaagttcatctctggctgttgcgtaatatgattttttgaaaagcatatcccatgaaagatattttgccatacagtcaaactgcttatcaatcagctcatactggatactgtctacgggaggaccgcctacaacaatcgtgccaacttttttattttttaactgcaatccacggcagtagcacttatcaatgataagtttcaattgtgctgacattccccaccaataaactggtgtagcaaaaagaatcatatctgcggcagcaattttatcaatttataaatgcattgattgctgtcagcgtgtttccttttctggcacttccattaatgattacaattttcatgcatgtatcctccaacttcctatttgtatgtctctattataccataatgatagtggtatgtgaaaaattatatattcatttaaagtgaatttttatgcaattttaccactttactgcattaaaatttaatactttttttataaaatatgcaaaatataacaaaaagtactggacaaaatgtcctatacgaggtaaaatgcatatatgtaatcaaacagcacatttgaaggttgtgcagatagtattggttatattttgcgaattggggggatttttcatgagaatatatcatgctaaggattatgcagatatgagcagaaaggctgcaaatatcgtatcggcacaggtgattatgaagcctaattgtgtattgggactggctacaggctctacacctatcggcttgtataagcagctcgttgagtggttcaagaagggggatttggacttctcagaggttatgacggtgaaccttgatgagtacaagggattaagccgtgagaatgaccagagctactattattttatgcatcagaatttgtttgatcatgtgaatattccggttgagaatactcacctgccaaacggcatggagccggattcacagaaggagtgcaagcgctatacagagctgattcagtctcttggcggtgttgatttacagcttcttggtatcgggcacaatggtcatatcggttttaatgagccgggagagtcttttgacaagcaggtacactgtgtgaatctgacagagtctactattgaggccaataagcgcttctttgcatcggctgatgatgttccgaagcaggcttatacgatgggcatcaagaccatcatgcagtctaagaagattcttattgttgcaagtggtgaggataaggcagatattgtgcacaaggctttctttggaccgattacaccacaggtgccggcttctgtattacagctgcacaatgatgttacgcttgtagcggatgaggctgcactgagttgtttgtagatattttttagttgagaaggtgcatgtatatgataataaaaaatgcaagggtatttacagaggatggcagctttatgcaaggtgatgttgtcgttaaggatggccgttttgacagtgttttggagagaacagctgacacggacgcggctaatgacagcgcaccgcaggagattatagatgcatcaggtcttatcatgataccgggtcttgtggatattcattttcatggatgcaagggagctgatatgtgtgatggcaccaaagaggcacttgatgtgattacagcatacgaggcttctatcggagtgacgagcgtgtgtccggctactatgaccattcaaagggatgagcttttgagtgtcatgaaaaatgccggtgattatacttatcatggtggtgcacatcttgtaggtatcaatatggagggaccttttatcagtccttctaaaaagggcgcacaggcggcagagaatatcatgcgatgtgattatgattatttttgtgagcttcaggatgcggccaatggcttgataaagcttgtagatattgctccagaggagccgggcgcgattgattttatagacagggtaagaggaagtgctgtggtttcaatagcacacacagcggctgattatgacacagcggtagaggctattgagcatggtgcaagccatgccacacatttgtataatgcgatgccaccgcttcatcacaggaatcccggagttatcggggctgtgagagattcagaaaagtgtcatgcggagctcatttgtgacggagtgcatattcatccgtcggttatcagggcgacatttgccatgtttggtgcgaagcgcatgattttaataagtgacagcatgagagccacagggcttgaggatggagagtatacactcggtggacaggcagtgacggtcagaggtccgcttgccacacttcatgatgggacaattgccggctcggcaaccaatctgatggattgtatgcgtttcacagtaaggcaggcaggtattccgcttgaggaggcaattatgtgtgctacagccaatccggctaaggagattggcatctatgatgaagcaggcagcatttctgcaggaaagagagcagattttgtgcttctcaatgatgatttggatattgtgagtgtgtatatcgacggaaaggagatatcatgttaggtttttttaagaataagtcaaagggaaaggtgatctgttctccgtgcaacggcagagtggttcctattacagaggttccggatcctactttttctgagaagatattgggagacggtgtggccgtgattccttctgagggcagattttacgctccggcggatggagaggtgacagctgtatttgatacgcttcatgcttttaccatgacgacaactcagggagtcgagctgcttttgcacattggtctggatacagtgacactaaagggtgatccttttaaatcacatatttctgttggtgatcaggtgaagaagggtgaccttttgatggaggctgacctggagcagattaaggcagcagatcttaatgtcattactccggttttaattggcaacactgctgattatagtgagataaagatgctcaaagaggggaatgtatccgccggtgatgagattttaagtctcgcgtagatttgaatataattatataataataacgaactttattggagtatctccagtttagtatacataatgtaaaggaggggaaatttatgaaatttcttcaaaaactgggtaaagctttaatgcttcccgtagcggtgcttcctatctgtggtatcctcatgggtattggatattatttatgtcctgcaaccatgcaaggtggtgatatcgaaggtgcgcgaaatttaataggtctgtttttagttaaagccgggggcgctttgattgacaacatggccatcctttttgtaatcggcgttggtgtcggtatgtcggataagaacgacggtactggcggtattgcagctttagcttcatggctgatgatgacaacactcctgtctacaggctttgttaccacaatcatgccatctatcgctgacagcgctacaaagacacttgcattcgacaagattcaaaacccatttattggtatcttggccggtattattggttctttgtgttacaacagatttaaggatacaaagcttcctgactggctgtcattcttcagtggcaagcgttgcgtagcaattatcgcaggtgttgtttcaatccttgtatctgtagtattactgtttgtatggccattacttttcggtgctcttgtatctatcggtaaagcaatcgttggttttgatgtagtcggtgcaggtatctatgcattcctgaaccgtctgttaattcctacaggattacaccacgcattaaacaatgtattctggttcgatactatcggacttggagacctcaaacatttctgggcaggcgagacatcaaaggatgtttcatggagcctcggaatgtacatgtcaggtttcttcccatgtatgatgtttggtattcctggtgcagcacttgctatggttaagtgcgcaaagcctgctaagaaaaaggctgccatcggtatccttgcttctgcagctatctgtgcattcatctgtggtgttacagagcctttcgagtttgcatttatgttccttgctcctgctctctatgtgatttatgctttactttatggtattttcacaatgattacagtagctcttggatttagagcaggcttctcattctcagctggtgcgatggatttattattctcatcttcacttccggctgcagcaaggacatggctcatcattcctcttggaatcgcagcttttatcgtattctacattgtattctatttcgctatcaagaaatgggatcttaagacccctggtagagaggacgatgatgtcgaggcagagaagaaggcagtgcttactaacaatgactacacagcagtagcaaagactattcttgagggctgcggtggcaaagacaatattgcaagcattgacaactgtatcacaagactcagacttgaggttaaggatatcactcaggttgatgacaagaagattaaatctgcaggtgttgcaggcgttatgaagcctggcaagaattctgtccaggttattatcggaacaaaggttcagtttgttgcggatgagttttctaagctttgcgagtagatttgttctgcaatatagcagtgttgattcacattagttgattcacataatttcataatacatgactaaaagccacaccgggtgttatgcctggggtggcttttttgagttcgggccgtaaactctgcccggtcgtggtgcacacggaaatgtatagctttacagcaagggttgaaaaacaaacaaatgtttgttataataaatgaagcgaggaaataaaagtatattaggtttagtaatttaagtattcatttaatttattgtaattagggaaaatccaatatcaatcgattgatagaaagagtgattttatatgaacatatggctaaagttaaggaaaacagcagcaattgcattatgtgagttacttgcaattgctacaatttttacaggctgtgcctccgctgatttatccggcacggaaggtgccgggcatgccacaggagctgtagtggcaggtgaggattcttccggtgctttaggcagcaaggataaagtggatgggccgcaggaggatcttgtaaacaacaattcctacgtttcccttgatgcgattccggcatatgatggcaaggcatacgtggccgtcaacaataatgagcctttttttacggacagcgatatgactaccactgcttttgaaaattacagtgatttggattcacttggcagatgcggtgtggcttatgccaatatctgcaaggatatcatgccgactgaggagcgtggcaagataggtatgataaagccatcaggctggcatacggtgaagtatgatgtgataaaggacaggtatttatacaatcgctgtcatcttattggatatcagcttgccggggagaatgccaatccaaagaaccttattaccggtacgagatacctgaatgtggagggcatgcttctgtttgagaatctggtagcggattatgtaaacaatacaggcaatcatgtgctctacagggtgactccgatgttctcgggcagcaatcttgttgcaaacggtgttctcatagaggcaaagtcggttgaggataacggtggcggcatactttttaatgtctattgctataatgtgcagcccggagtcggaataaactatgagaatggtgacagctggctggatggcaccacaggaagtacatcatcaggctcagacagctcagcagcagaaaatagcgctgcagattcctcaaacagcgagacgatggttcatatcactgcaaccggcaagaaataccatcgtgcgggctgtcggaccttgaaaaagagtgacacagaggtaacgcttgatgaagcaaaatccatgggcttgtctccgtgtggcatctgcaatccgccgcagtagatatgcattagcatttgcaaccgttcacagcagatgctcgttatctttgcagtccgtataattaccataaacccttgacgattgcaaaaccgaaaagtataatagaatagctaatgaattcaatattttaatatagatggaggaaaccaaatggcactgagcaaaaagccggtcaacggcatgaaggatatactacctgcagagatggaaatccgtgattatgtgacaagcgtgatcaaggatacatacagaagcttcggatttacaccgatagagacaccatgcatggagaatatagcaaatctcacaagcaagcagggcggagaaaatgaaaagctgatcttcaaggtaatgaagagaggcgagaagctgaatctggagacagcaaaggaagagtcggatgtagtagactttggaatgcgctatgaccttacagtgccactttcaagatattattcaaacaatgccaacaacctgccatcgccgtttaaggcacttcagatgggcagtgtgtggagagcagacagacctcagagaggccgctacagacagtttacacagtgtgatatagatatactcggagagccaagcaatctggcagagatagagctgattacagcaaccactaccacaatcggcagactcggcttcgagaactttgagataagaatcaacgagagaagaatcctaaaggcaatggctgcttacagtggttttgctgaggaggactacgacagcgtatttatcacactcgataagatggacaagataggagtggaaggcgttgcaagtgagcttgcacaggatggctatccacaggaaaatattgacaaatatcttgatttgttcaagcttttggagcagacaagggatgtcactgagggtgtaaatatactttcagaaaagctcggtgaatatttagacgaagaagtggttacaaatatgacagagatagctactgctgtcaatgccacaaagggagcaaagtttgagctcgtatttgaccctacacttgttcgtggaatgagctactacacaggaactatttttgagatatcaatgcctgagcttggcgcagcctgtggcggtggcggacgatatgacaagatgattggaaagttcaccggaaatgatgtaccggcctgtggtttttcaatcggttttgagagaattatcctgcttctcatggagagcggcttcaagattcctgagagtccaaagaaggtggcttatctggttgagaagaaatatccggcagacaagcttgttgatgtcatgaaccaggcaaaagacgcaagagcaaacggacagcaggtgcttgttgtgcgcatgaacaagaacaagaaattccagaaggagcagcttatgaaagagggctacgaggagtttgttgagttctttaacagataggaatctgataagcagcagattagctgtgcagcagcggtaccaaacagttattagaataaatatatagtagaaatataaggagcataaaatggcagaatcaatgcagggcttacatagaagccatagatgtacagaagtatcaaatgccaatatcggtgagaaggtcaccgtgatgggctgggtacagaagagaagaaatttaggaagtctcattttcgtagatttaagagacagaagcggaatacttcagatagtattcggtgaggaaaatgtaggtgcagagggctttgaaaaggcaggcaccttaagaagtgagttcgtcatcgcagttgagggaactgttcagaagagaacagctgctgtcaatgagaacttaaagacaggtgatatcgaggttatcgctacatcaatcagagtgctttcagaggcacagacacctccattccatattgaggagaattcaaagacaagcgaagacatcagacttaaataccgttatctggatcttcgccgccctgatatccaaagaaatctcatgctcagaagcaatgtgcttcgcgtgatgcgtgactttatggcaaacgagggatttttggagatagagacaccaatcctttgcaagtctacaccggagggcgccagagactatctcgtgccaagccgtatacaccacggacatttttatgcgcttcctcagtcaccacagctctttaagcagcttctgatggcttcaggctatgacagatatttccagattgcacgatgcttccgtgatgaggatctgcgtgcagacagacagcctgagtttacacaggcagatatggagctttcatttgtagatatcgatgatgtaatcgaggtaaatgagagactcttaaagcacctttttaaagaggtcataaatgtggatgttgagattccgtttaagcgtatgccttggcaggaggctatggacagatttggttctgacaagcctgatacacgttttggtatggagctttgcgatgtttcggatgtggtaaaggactgtggctttggagtattcacaggagctcttgaaaacggtggctctgtccgcggtatcaatgtagagggacaggcaaagatgcctcgtaagaagattgacaagcttgtagagcatgcaaagggctgtggagcaaagggacttgcttatctgtgcatcaatgaggatggcacatacaagtcatcatttgccaagtttatgacagaagctgagcttgatgcacttgttgcaaagatgaacggaaagccgggagatttactccttttcgcagcagacaagaataaaatcgtatggaatgtacttggagcgcttcgtctcatgctcggagctgagcttggcctgattgatgagaacaagtacaatttcctctgggtaacagagttcccactccttgagtggtctgatgaggaaaacagatttatggcaatgcatcatccattcactatgcctatggaggaggattgggacaagatagactcagatccgggcgcagttcgtgcaaaggcatatgatatcgtactcaatggtacagagctcggtggaggctcagtgcgtatccatcaggatgacatccaggagaagatgtttgaggtgcttggtttcacaaaggagcgtgcacatgagcagtttggattcctgcttgatgcattctcatatggtgtaccgccacacgcaggacttgccttcggtgttgaccgtatctgcatgcatatgctgcatacagacaatatcaaggaggttattgcattccctaaggtaaaggacgcttcggacctcatgtcagaggcacccggaactgtagatccaaagcagcttgaggagcttggaatagctatagctgcagaggaagatgaggaataacactataatatgaatttgaaaaaaaatattttcaatgcgattaccataatactgctcgccgcacttattgcgggggcagtattgcttaataacaggataaaaaagctcgagacacagatgtcatacacctcagacaacacatcggtgatactttccgatgtgcagaccatgcaggatgatatcaagtccacccttgaggaggaggccagcctcataacagactgggatatttccttaaaaagtgcagactttaccgataagacatacacagtctctgtctcggtggtgccaaaggagtacacagaggatacaaaaaccagtgtatttttcggtacaaacgagataccgctcgagctagacggcatcaagtatacgagtgaggccacacttccgctgtctgaggactatgcaggcaatgtgacatttctgtttgttgacggaaataagagaagcacagaggtgctcgataagtttgaaggtgtgacatcagtgttcaaaaatgtagcatccggcatacttgccgataaaccaacctttgacaatggcagcataaagcttggcacagatgtagatgtagcagtcatgggaaatgattactttgactttaatagtgtgcagctcgtagttgcaagctcagatacagagctaaagacatacgatatccgacagctgttggcagaaaacggcacggatagtgcagactctgcagacacagattccatcacatccgccttaagccggaaggatgatgccaaaaaagatggctcaaagaatgacacggaaaatgatacctctgatgcctcaaaagaggacgacggtaagctccatagcctcgaaggcacagtcaaaatcgaagacttaatccctgtcacagccgcaagcaatatcaaaatatatgtcaaagcagtatcggcacagggctacaccttcacatatgacctgttcgagggtaccgtaaatcaggacatcacagactttgaaaccacagccgacatatccggcggcgactacacagtaaccgacccgtccggcagcaaatatgaaccataagaatatgatataaaataaagctcatttcgcataagtgaaatgagctttaaatttaaaaagtaaaaagtgccggacaaaatttcacgccagtgaaataagtccggcactgccggaatgcaaggtagcaaagcgcctcgctcgtaaacctgaattagccggagagcatacagtgtgttccgaagaaaaatgtgaactgccgcggagttccataaattaaagaagaaagaaaacataaataaaatcgtaacctgtccggataaagaaccgcggctgacttcacatttttctgaggaatatactgtgtgctatgccggcagcttcacaacctaaaaagcgaggcgccaccaccaccaatcatttgatgagctgcgcctcacccttcttttttgctgagcggcagcgtaaatataaactcagttcccacaccctcagtacttatcacatttatattctcaccatgcgcctgcacgatttctttaactatagacaggccaagtcccgtaccgcgcttatcctttccgcgggataaatcactcttgtagaagcgctcccagatctttgaaaggctgtcctttggtataccgataccgtgatcctttactgatataaacaccttttcatttctgatactcgtctcaatcttgatactcgaatcattatttgaaaacttcacagcgttgtctatcaggttgtaaagaatctgctggattttgaccatatcaccgcgcacgaaaagctcttttccggtgagcagcaggtcaaagcttaagcccttctcactgcatttaccctcgaaggtgaggattgtcgtgcggatcattgtattgatgtcaaaatcagcaatatccagatgtatgccgtgatgaccgaactggttcagatcaataagactcttggtgagcttattaagcctctcggtctcaaaaagtatgatgtttaagtatttatcctgcatctcaacaggaatggttccgtccagcatggcctccacgtagccctttatcgaggtaagaggggagcggaagtcatgtgacacgttggaaacaaacttgcgctgatcctcctcaagcgtatcaagctcagttgccatgtagtttagtgtgtttgccagatagccgatttcgtcattggaatgtacatcaatctgggcagtgaaatcgccctttgcatacttctttgcggtctttgtgattttggtgataggacggtaaatggagcggctcatcgtgacaagcataataaatgccactgcaaaaatgagcgctacagtgtaaaaggagatattcataaaaccgtttacacctgccgtgatatggctcattgtcttgtgaatgactatgtagccgatattctggtacgagacatttaccggggaaaatacggacagcatcctatgcttgaaggagccgtaaaaatttccaatcatatagttgtcgctgccaaaatcggtgacatcaaagccatttatcaatacaggcttagaactgtcattttgggtatcagtgcctattgacggatcatctgagtccatgagcagctcaccgtcagggctgaccacccatacctcggcatccatatagtcagctacgattttcatgtgattctggaaatcgctaagcgacatggatgagccaaagtattcactggcatagtcacctgcaatgatggatgcttccctgtagagattggatgcttcctgcttttcgatatagtctgtggtgagatgctgtgtaaaggtgcatataatgaaaaaagcaatgacaccgtaaatcaggtagctgattaacagcttagagtagatggtatgcttcattattattttacctcaaacttgtatccgataccccagacagttgcgatgcgccaggtaggcttgtccttgattttctcgcggagacgctttacatgcacatcgacagtgcgggtgtcgccgacatattcatagccccatatgttgtccagaagctgctcccttgtaaacacctgatttggagatgaggcaagaaaatataatagctcaagctcctttggcggcatatcaatctgctgtccgtcataagtgacagagtagttggacagatttacaataagccccgggtactccacacacttgatatctacggaagcataggcttccggctttgcaggctggaaacgtctgagcacggccttgactcttgccacaagctcctttgagtcaaagggcttgagtatatagtcgtcggcgccaagctccaggcctaaaaccttgtcaaatacctcgccctttgcggagagcatgataatcggcacatcggactttgcacgtatctcacggcatacctgatagccgtctatgcccggaagcatgaggtccaaaagaagcatgtttggcttgtagtgctcgaacgcgataagagcctgctcaccgtcatttacgattttggtgtcatagcattccttggtcagatatagagatataagctctgctatattgttgtcgtcgtctactatcagtattttctgtttaacagccatttctaatctccttcttaaaatttatttatattccgtaaaagtacattgtcgttatttaaaggttgcgatggttactccggcatcgccctcaccaaactcaccgagatggtattccgcaatagtttttgtcctcttaaggagtccatgcacagcctttcgcagtgcaccggtgccttttccgtggacaatgcgcacagatgtaagatgagcgatatatgcgtcgtccaagtatttatctaagagagcaagtgcctcatccgtagtctttcctatcaggttgatttctgatgaaactgacagcgatttgctcatctttatcttgcttccgctgccgccgtacttcttggcaggagatacatcgtcgtttaagagcacgaggtcattaatattaaccagcgagcgcagtatacccatttgcacatacaaatcgcccttggcgtttggcagagtgtggacggttcccttcagattgagggagagcacaagcacagaatcaccgatgcgcagcttcttaggcgccttgtgatttgccttggcagtgtttttcttgatgtctgacagcttcttttccttgtcattcatcttgtcacgaagggcagagcgctccttttccatctggctcataggagcctgcccctgtccgtatttgttgaaattgcggatggttttgtcggcaagttcctttgcatcctgcagtatcttgtaggcttcctcatttgcctcgcgtaaaatcttgtctttgctcttgtctatgcgctcatttttctcttcgagctgtttcttgagcttttcaatctcggccttgtagctgttgatttcaagctgttccttttcgatggtttgtcgctgtgactcgaggcttgcaatcagatcctcaaaatcaaggtcattatcattaattctgctttttgcatcctcgatgatgttttcgtccagaccaagctttgatgagatcgcaaatgcgttactctttccaggaataccgattaacaggcggtaggtagggcttaaagtctccacattgaattcgcagcaggcattttccacaccgtctgtggaaagcgcatataccttcagctcactgtagtgtgtggtggccatggtgatggcgccatactggtgcagtctgtttaaaattgagatggcaagtgccgcaccctctgtcgggtcggttcccgagcagagctcatcgaacagacaaaggcttctgtcgtcagctttttcaagaatttttacgatattggtcatgtgagacgagaaggtactgagactttgctcaatactctgctcatcgcctatatccgcaaagacatcctcaaagatggcgagctttgacctgtcagccgcaggaatgtgaagacctgcctgacccatgagagtcaaaagtccgacagtctttagtgaaaccgttttaccgccggtgtttggtccggtgatgataagctgcttatattcctcgccgagccgtacatctatagggaccacctttttagcatccaaaagcggatgacggccctttctgatattgatatgcccctcggtgttgaactcaggtgccacaccgttatatgatttagccagatttgcctttgcaaaaatgaagtcaagctctgaaagaatctcatagtcctgctccaaagcagccgcattcatggcaaccttgtcgctgagcgctgcaaggattttttcaatttcctcctgctcctttatgaaaagctccttgagctcgttattcaaattgacgacagccatcggttcgataaaaagggtagagccggtagatgactggtcgtgcatcatgccggggacattgcccttagcctcagcctttacaggcagacaatatctgccgtcacgcatggtcacaaccgcatcctgcagatatgtcctcgttgtgctgttgttcatgagtttggtgagctgcgcatggattctgtcgttcatgccgcgtatgctctttcttatcttaaaaagctcaggactcgcatcatcggcaatctcttcctcagataaaatgcacctcttaatctcatcgcagagcgcagaaaccggttcaattcctgcaaacagaccggagagtgaatcctgcttctcattatccatggcgcttctgccataagccttcacgcgctttgcaacctccaaaagactgcagatgcgaagaagctcggtcgtattcagtgcaccaccgatatcaagcctctttagggaagcatgtacattgtgtatgccaacgaaggacactccgctgtccttgtacaggcggcttagtgcatcggcagtggtggtctgcagatgtctgatttcgtataaatcggtgataggctcaagcgaaagacaccttttctttgtctcatcacatgctgcgtagctgcttagcatggtgaggattttgttatattccaatgttttgtaaacttttttattcatttctatatccttatatttcggtagttaaatattaaatttatatttactgtatagcttatcatattatagctgaaaatcttcaaaaaaaccataataaatatgtattaaatgataattacaagatgataacataaagtttaatacttaacgaaccagtttgttaaacgagccaaaaagtaagggcttgcagcagtccggcgggtacatgccacaagcccgtactcaaaaaatatggttgcaacgcaatataattcagaatataatgtaagatagtaactaaagacatctaatcagggtgacaatatggagcaatttatcagagaaaagataaaggataaaccgctgaataaaaaaagacttgcaaaaaaagcaggcacagcagcactctgcggagtggcatttgcagtggctgcaagcattgtttttgctatatttctgccagttatcaacagacaatcaaaaaaagcttcagatggaaaaaataataatgatgtgcagatagccacacagcagcctggcatagatgacagcaatgatgcatatagtgaaaatggtacacaaagcacagagtccggcacttcttcggagccgtctttgcagacctatcagcctacactcgcagattatcaggcagtgcagaaccagctctacagcgtgggcgcttcggcctcgaaatttgtagtaggagtcacgggtgtgacagatgccactgatattttcaacaattcctatgagaccgagggtcagggagtgggagtgatactgagggacaatggaaagcagctaatcattctgacagagaaaaatgtagtggataaggcggataagcttagtgtaacctttgtaaacgacatgatggctgatgctgcgctggtcaagtatgacagcaatacaggtatagcaatcatttccgtggataagtcacttctggacgacaccacaacaggggctatagcggttgcggagcttggtaattcaaatatcgtttcaagaggagcatctgtcattgcgcttgaggcaaactatgccattctcacaggtcttgtaacgtcaacaaccaacgagctgtcggcgcaggacaacaattactcggtgctcaccacagatatcgcaagcaacaagttgcagagcggtatactgattaatacagatggtcaggtcatagggctttcgctgcaggatttcaatccggcggaggaaaacaatacgctcacggctgtcagcataagcgacctgtcacctgtcattgaaaagctcgagagtggcgcggatgtgccgtacataggcatcacctgtactacagttacagaaaaaatagcaaacagatataacatcccaaagggtgtttatataaagcaggttaccatggattcaccggcatttgtctcggggcttcaaagcggagatgtgatagttgcggtaaacaatacagatgtgtcgaatgtgtccgcgtacaacacacagcttatgaagcaaaagcctgaggatacctgcaatctgaaagtaaagagaaaaggaagcaacggctacacggagattacctgtcaggtgaaaatcggagtgatgaattagccgaaattaggaggatatatgaagtatatttcaactctccgcgagggagagagaatcaatgagatttttttatgcaagagcaagcagacagccatgaccaaaagcggaaagccttatgacaatgttatcctgcaggataagacaggcacgctggatgccaagatatgggacgtgggctcagtaggcattgaggaatttgatgcaatggattacatagctataaccggtgatatcacaagctttcagggcaatttacagtgttccataaagcgtgcgagaaaggtgaacgagggagaatatgaccctgcggattatctgccggtcagcgataaggatgtcgaggtcatgtataaggaactcatgggctttatcggctctgtaaagaatcagtacctgtcacagctcttacatagcttttttgacaataaggagtttgagcgccgtttcaagttccattcagccgcaaagagcgtgcaccacggctttgtaggaggtcttttggagcatacactcggtgtgacgaagaactgtgattattttgcaaaaatgtatccggttttaaaccgtgacctgcttcttacagcagctattttccatgatatcggaaaattaaaagagctttccactttcccggagaatgactatacagacgcaggtcagctcctcggacatatcatgattggtgcagagtgggtaggcgatgcgattaagagcatcgacggcttcccggtagtgctcgcaaacgagctgaagcactgcatacttgcccaccacggcgagcttgagtttggctctccgaaaaagccggcacttgtcgaggcactggcacttagctttgcagacaacatagatgccaagatggagacattcagggagctgcttgtaaatgtgcctgaaaacgatacaaagtggcagggctacaacagatttatggagacaaatttccgcagaacaagtgtgtaaaaagcggacaatattaaatatagctatggtgtgatttttggtgtgaaagcttgcgccggatacaaacattataaagagtaattatatataaaataaagaagagaaaagcatgaaaaaaaatgacatatttgaacttgaaataacagatatgggaacagatggcgagggtatcggacattatgatggcatgacctttttcgtaaaggatgcactgattggtgacgtcataacagcccgcgcaacaaaattaaagaaaaactatggctacgcaagagtggaagagattaagaccccttccacttttcgcgttgagccgcaatgtgagttgcacaagaggtgtggcggctgccagatacaggcgctctcctatgaaaagcagcttgaatttaaaaataataaggtgcgcaataatctcatgcgtataggtggattttctgaggcaaagctggacagtaaaatgcagccgcctgttggcgcagacaatccataccgctaccgcaacaaggcacagtttccggtgggatatgacagggatggcaatatagtgacaggcttttatgcatcgcgaagccacaatatcatcccggtcgaggactgcaggcttggggtgccgcaaaacaaagagatactcgacatcataaaggaatggatgaatgagtgcggcatcacgccgtatgacgagaacacacacaaagggctcgtgcgccatgtgcttatcagatatggatttacatcaaagcagattatggtgtgccttgtgataaatggggacagtcttgaagcaaaacgccgagccgggaatgcaacagatatactgtgcgaaagactctcaaaaatcgatggaatgacttcgatttcctacaatatcaacaaggaaaacacaaatgtcatcctcggcaaaaagacggtctgcatatggggcagaccatatattgaggacaccatccatctgctttcttaccccgatttcacaccacaggggacaggcatcacatatcagatttcgccacagtcgttctatcaggtaaacccgaagcagacagaaaagctctacagcacggcacttgcatttgcagggctcacaggaaatgaaaatgtctgggatctctactgcggtatcggtaccatatcgctctttttgtcacagaaggcaaagcaggtgtacggagtggaaatagtgcctcaggcaatcgaggatgccaaaaacaatgcgaagctaaatggcatcacaaatgcacagtttttcgtaggaaaggctgaggaagtgctgccacagttttatgagaatgcaaagaaaactgagaaaatcactgatgatacaaaaaccaccggacgtacagatatgcttcgcccggatgtgatagtcgttgaccctccaagaaagggctgcgatgagaagtgcctggacacaatgcttgcgatgtcaccggagaggattgtatatgtgagctgcgattcggcaacattggcaagggatttgaagatactgtgtgaggagaagtatgaactcataaagtggcaggcatttgatcagttttctcatacgacgcatgtagaaacagtctgccttctgtcgagaaaagcccaataaatcaaaggatttcgccattttgggaataaaatagatgtgtgtttctgtttccgtagagtgatgatataaccggatgtttaccccaggggataggctttgggaaatgggagatatacattttggcgaaaggatactttttcgcaaaagttgtttcacgtcatgaggatgagaagatgagtaatgattttgagaattcacaggagtataggaaagcacttgagatagctaagaagcaggaagaagtatataaaaatgttacgaaagcgatatctccagaagcgttagcaaaatttcaagaactcagtaacaaattaagcgaatggaagaattcacttaataatatgccggggcttctaaagtttgcagaaatgctcaaaaattatcagcaagaggtcagagtaactgaaggtttaactgaagctgagtttgaagaaaaatatagatctgaaattgagtggagtgaaaagttcggaaaaaatggttgggttatttctgagcattcaaatcttgcagatattaaaaattgggaacaattattacgtgaaggggaagcaaaggtagcagagttttttgacggagaagatattgtaattcttgatgtgattatagagggattacaagaaaagtatgtttcggacgagatacagttatattttaagaatggtatgcaagcttttgaaaatgaagattatatgactgcagctatgtacttgcttgcattacttgataatagagtgaataaattagttgattttccgaaccaacatatgagttacaaagttaaatattctaatagtggctttgcaaatcaaatggccgaggattttagacagcttaccgaaaaacgaggatttatgtcaaagaaaatatactttttggaaatgtatccttcgttaattgcatatttgaataggatatttatagatggctcatacaagttcgaaaaaggtatagaacctccgtatttgaataggaattggttaatgcatggtcgaatgaatagaagcattgaaagatatgaatgtatacagattttgaatgcactaagtgttatcgagttcatgtttggagataggtaaggagcattacgaatgaataaaagagatgatttttcgcaaaaaactatagatacgttgtgtgaaagagtgggaggaaagtgttctaatccaaattgtagaagagaaacaaaaggtccccacagcaatccacaaaaaagagtatcaattggtgaggcggcacatataactgcggcagctgaaggcggaccaagatacaatccggacttgacgccagaggagagaagtagtatagaaaatggaatttggttatgtaggtcttgtgccagattgatagatagtgatgaaagggtatattcgatagaattactgagaatgtggaagtatgcagctgaatacgaacaatcttgcattattaatcagacagataattggttaaaaacaaacgttgtatttgaaaatagaaaaaatatagcgtgtaggaaggcaaaagaagcattagataatttgcacggtatattgcaatacgcatatgaatattggaaacataattttgaaaatcgacattatggctcatttttggaaaatgagctgatggaacattgggttttatatgaagatgacttaagaagaatttatacatttcaagagaaaagagtgcttttgaatgaggtattattggagtattcactggatttaggaccggagatatgtaaagaaataaataattattgcaattatttgaatttctcttatcaaagtgatacttgtggtctatatgataattattggagatgcttttttgaaatgttgtctacttgttttgatattttagtgggtatcaagaacaatgttgatgacatattataccgacaatattctgtattgaagtaatatcttatgataaattagtaagagatgctaaacagaggaatcaaattctttttgacaaattgtttaatccgaaagtaaatgaggttttaaattccaagttgttaaacgaatagggttaatgtatagtcatggtgccaattagacatttctaattggcactacccatttaaaagaaaaagaacatttagaaggcggaagaattgaaggtgaaaatatcaaagcaaagttgcagacaggagagtttggtttagatatggcagagtatatgggcgaatataaaataataagaaggatggatggtggtggaaatgccaacgtttttgttgcggagaatgcaagaggtgaagaggtcgcgatcaaaattcttcgagaagaaagtggtaacggaaaaaaggcggtaaaaaggaatagaaaaaagagaatacgttttaagattgagacggagatggtagttgggattcaagatgaaattaaaggggttattcctattttttcttacggattacctgatgaaaaaacaaaaaaatattggtacgcaatgccaattgctataccccttgaagataaattgaaagaagtgaaaagccttgaagataaagtgaattgtgttttggaactggcaagaactttggaagcgttacataaaaaagatattgttcatcgagatataaaaccgaaaaatatatacttttacaatggtaagtattgtcttggagattttggcttagttgactatcctgaaaagagagatttgacgtcgcttcaagaagcagttggtccaaaggctacaatggctcctgaaatgagatataatgcaaaaaatgctgatggtaaaaaggcagatgtgtattctcttgcaaaaacattatggattgtattgactggagtagatcatggatttgaaggtagatatgaagaagatgatgcgataattggactgcgtaatgacaagaggtataaaaaggaacatttagtggaattggaagaactattaaagcaggcaacagagtacgatccgtcattgaggcctagtatggaaacttttgtgacaacacttgaaaaatggttagaggtagtaagcaattttcaaaagagcaattatagtgagtggaaatatttacagaataggctgtttcctaaaacagtaccattacatgctgagtggagagatatagattctattataaaaattttaaatgatataggaagtatgtctggactaaatcatatgtttttgccaactggagggggacaggatgtagaatcggcaaaatacgcaaacgaagaagggtgtatctgtttggtagctggaggttgtaactacatatttaaaccgtataggttggaattagaaaattacgggaaaagagattatagatggagttattttagattacaattagaaccaatagaacctatttctaatgcgatatatgaggattgtcgtgaatcattgatagaagattttccgggacattatatagagagcaatctggcaagttatggaagatatgatgatggaacagagtttcctaaaggacacagacaagtcgacagatttttgaatggctcgtttgttatcttttcaaaacaatctgtatataatcacatctctggaacttatgatgcaaggcataataaaatgagcagtttggaatttcgacattatattggaactatgagacaatcatattatatgatgaaagattttactaaattttcaagcatttaccagaagaatccatttagtattaaagaagaaaaagaggatgtagaaactcataggagaatagaagaaagttgtaagtttgacaaatttatcgaagaaaattggaataaatggtgcttaaaagatatttgtgatgaaaataataataaaaatgatggtaagttggaatttgctattatgtttcatataaatggtggaacttttggtgcaagaaaatatgtggcggagacaggatatatttgtgaagaagatgttataccgtatccggtaagcaaggatgggaaatatttatttacagattttaacggagcagttaaggctattgttgaaatgaaagattatataaaaaaattatgcattgaatcagggatagtatggcaggaaatgggtatttattttacaataaaactgtttcggataaaacctccatcacatatatttactgaagaagaaattaaagaagtattaagagcaggaaatgactttaggaataaccgattggttattgatgaagaaggatatgcccagttaatagatagtgatttacattatgaatgttatcgatatccagtgtctcaagagagttatgatgctcgaaataattatgttggacaatacgcgaatttggatgatgtaggtgaaatctatctggctatgcttgatggttggttacatcacttgcgtacagggcaaaggtatgacgttgattattatgatcaatgtgaagatgcggaaaagatgttagcagaaataaagcaatactatcaatagtgcgtggggtaaaatttatccccctaggtggagtatgaaccttttcgcaaaaggcaacagtttcgctatttagtataagaagtaactttcaccgcacgtagaaagtatttgcctactcgagcgggtgagcaactgaactggtttaaaagaatatggtcgcagatcgacgtaggacactcaaatgattatattttctttcatatgcgaaaagcagacggcacatatatttcagtgctcgatcatggcaggatagtggattcagtgcgcaatggcagagtattttatgtgatgatcatggaattgaatgcattgcagaggcactatggagactgcctggagctggtggaaaagtagaaaaagcagattgtgaacacatgcgttcacaatctgcttttttaatagtgcatacacaatttatttatccgaataaatcacatttccaccgcatacggtgtacttcaccttgccggtcagttccatgccggtgaaaggtgtgtttgatgattttgatgcatattcgcatggtacccatttttcatcaggatcaaagatgacaaaatctgcagcagcaccctctgagatagtaccgtaaggcatgtggtacagccgggcagggttgatagtcatcttttccaaaagctcaagcatgctcagatggcccggtttgacaaggcttgtgataccaagagcaagagatgtctcaagaccgatgataccgcttggagcttcggttacaggctttgatttttcctcggtgctgtgaggcgcatgatctgttgcgataaggtctattgtgccatcgataagtccatctataatcttttgacggtctgcttcagtgcgaagaggcggattcatcttggcaagggtgccgtgctctaagacagcatcctcagtcagtgtgaagtgatgtggagtggcttcggcatggagccttgcaccaagctttttgtaggtgcggactatatcaacagatacaccggagctgatgtgctgtattacaacgtcggcgccactgcgcagtgcaagcagacagtctcttgcgacaagggcttcctcagcgatggatggtgagccgtagataccgagagcgtcagatacttttccgtggttgatgccgttgtttttgataaatgcagggtcctcctcatggagacttatcggcatatcaagctttgcagcattttgcatggctctgtagcagaaagctgcatttgtaagagggatgccgtcatctgtaaagccacatgctccggcttcctttaaagctgccatgtcaacctcatcctgtcctttgagggagtgcgatattgcagcggcctgatacatacggattttttcctgctttccacgtgtgaggttgtcctttagagtatcaacattgtccactgtaggctttgtgtttgccatgcacacaacagttgtgaagccaccctttgcggcagccatggaacctgtgtggatatcctccttgtatgtgaagccaggatcacggaaatgcacatgtgtgtcgataagtcccggtccgacaatcattccggatgcatctattatttcttctttttcagttgcagcagcatctgatgcgcatgagatgtcaggtgctatttttactattttcccatcttttacaagtatatccatctgttcgtagagacctgaagcagggtccgctacaatgccgttttttattatcatgataatcctcctgtagattgtacttattttctgatatatcctagtataacagttttaaacgaactacaccatatcacttgcatattttaccggtagtacaagaaaataataattactgttcacacctaacagtgtgaacagcaacgattacatcccatttaagtaaatggtatagttatttagaaaacgttatcatagtataattgagaagcacgaatttgcaaataaatttcgtaactgttcagtaccttcaacaaatttcgtaattgttcagtgctttcatagctgcgagccgcaagcgcattagaatcagcagcgcagaatagttacccaatttcaaacaaaagtgaaaattgaaaatgggtcgcaatcataattgtctgtatatatggacaatagaaaattttatagatataatatgatttaagggatcctgaattggatactttttgaccatcacatcattttactaagtaggactaaattggcataatgtacaatagccataggttgatagcatagtaggcagaccctggggagctgtaatccctaaaacttttaaaacagctcctaaaattcagcccaaaagccggaaaaaattgcgagaaaagtagctgaaaccgcagaaatctccaaaacagctcctaaaattcagctcaaaagccggaaaaattgcggagaaaagtagctgaaatcactataaatcacaaaacagcacaaaaaaattaaagggagaaaaacaatgagcttaataaaaggtatacatcacgtatctatgaagtgcagcagcacagaggaatatgaaaagacaatagatttctacaaaaacattctgggaatcccggtcacaagggaatggcaggcaggaatcatgcttgataccggaaacggaattgttgagatttttaacgatggagatgatgcaccgggcaaaggtgtgattcgtcatttcgcattcgcaacagatgatgtggatgcgtgtgtagaggctgtaaaagcagcaggatacgaggtatttattgagccgaaggatatagaaatcgcatcaacaccggtatttccggcgcgcatagcattctgcaagggaccacttggcgaggaaattgagctgtttcaggaaaagtgataggacgtattaatggttttacaggggtattatgctatgggaaaaactccaattaagcacacgcttgcaggctatattataaaaaaaacagataccgaaggataccggtcaggaaaactaaccggagaaaaacatttgaacaaaataacagaaatgatggaatttgttggcggacgccggaaactaatcgatcaggcaaggttcatagagaataatacacaagcaggccgcgatgggaagataagaattaattggattcaggtcaacagcgatattaaaaaaattgattgtgatgtcagcagcataccggagatgtgtcggcttgagggtgttgaggattcaagagcaaaacagctaagattgatagagtctgtaaagcagtggaaatcagaggttggtgactgcgattggatatgcagatattatgatgatattttggggcgtctggaagccggaaagagtgtcacagaggctgatgaggatatgcgttttaagtgtatcaattctataacaagaataaaggagcctgtgtgggagcgtgtttttagtgcaaaggtttttaatgattcaaagaaatttgaaaaatgctatcgacaaaagatggtatcaattctgactaaatattctccatattatgagaaggatatggaggattatgatacagagggagaggaagatgatgccaaagaggataataagaagtcggggcttgaaattttgaagatgcatggtattatgtcatatgcacagacaatggaatggaagggaccattgtcatatagaattgatgatacatgtgttattgatacgtcaaagcagatttatggaaccattattaatacgcagacacttgagcatgcaagtccggtttcgcttgcaggatgcaaaagaattatgaccatagaaaataaggctaactatgaaagtatgcaatatgatgagaataccttgtatattttttgtcatggttattttactcctaaggaagtgtattttctaaagaaattaagccttattgtatctaaggaatgtgagttcctccattggggagatatggattttggagggataagcatattcttgtttattaaggatagaatttttgaaaaactaatgccttatagaatgggggtagcggattttgagaaagcattaaaaaaagacgctggaataccacttaaggcttcaactagggaaaaactgcaaaaaaaggacgcaggattgcttgctgaattaaaagaagcaattcttgaatcggataaaacaatagagcaggaaaggctcttatgaggctgattcggaaaactctaaatacacatatatatttgacaaattattagaatgtgattcattcgcacagcatacctccttcgtgcatacaatagcatgaaggaggtatgtttgtattatgaatccatttaaaatgaggccggagagaaccggcgatttatttgttgactgggagaaattctgggtaaaaccatataacaaaaatgaggtaaatccgtatacaaggacgagaatcatattgatgaatggtacagaatttgaaaacgtgtggttttcacatcagttttcaagaagcgtaggtgatgatgagcttagacgaaagcttgcatacatcaggaaaagtgagcaacagcagcagaaaatactaacacatttaaagccggcagatgagtcggcattggagcacaccataggctacgagcagcttgcggttgacctgactgctcatcttgcaaaacgagtaaatgacaaaaatattaagtctgcgctcgattttgccttgctcgaggactttgaccatttgtaccgctatgcagattatcttgattttaccacaggtgagcacgcagagaagcttgtcggaggctatacggaaatcacaccgggcagaccgactatttcgcatcacaggcatccatatgattcaatacgatatccgatgacggataaatgccctgcgacaatggatgtgctggctgcaaacgtaatcacagcagcagaacagcagactatgaactactatatgaacacagcagcactttggcctgatgagatgggacgcaggctatatcaggaaatcggaatggtcgaggaacagcatgtcacacagtatggcagtctgttgaagccatgcatgagccgccttgaaaatctccttgtgcatcagtatgtcgagtgctggctgtattggagctgttatgaaacggagacggatacaagaatacgtggcatatggcagtttatgtttgaacaggagcttaagcatctgcatattgcacttgagctgctaagacagtacgagaaaaaggattggcaggaggtcatccctgacgctgagttcccggctcctcttgtgctggagagcaatattgagtatgtcaggtgtgtgcttggcagtacggtaaacgacacagcatgtcgtgaaaggtatgtggatgtaagaaccaatgctcctgaaacatttatcagatatcagcgcatggtcaatgacccggtaagaaatgtaatgagccatacctttattgaggattatatccgcaaaaacggggaggattatcgctttgaggtggcgccaaatccggtgccggagcttcgtgaccgtacaaaggataatatatgtgtgggaagacagcctctttgcaggaatcgatattagaagccattttaaatgagctgtaatcgttgctggttacactgttaggtgtgaacagtaacgagtaaggctcacagaagccggttgacgaaattatataggtgtattaaactgtaatcgggttagagacgactaattgcatacagctgttttgtattaagtggttctgaatattcagttactgcaaaatgatatacgaaacgatataagaaataatatgttgaataataaaatattcaaacttcccatattttattttgtgataccggcctagcatacagtgtattcctcatatttttttcttcggaacaactgtatactctccggtaaatatagttttatatatgggaagtttgtgtaaaatagaaaaatagctgaacagcagaataggaggcaaccatgattacatcaaccatattaggtttattaataccatttataggcacgtcgctcggtgcggcatgtgtactttttatgaaaaatgagctttcagtaaagaccacaaaaatgctcagtggctttgcagcaggcgtgatgattgcggcatcagtctggagtcttctgattccggcgcttgagcagtcacagagccttggaaaaatgcagttcgtcccggcagtagcaggctttatgctcggaatgtttttcctattgatactggatacgataacaccgcatatgcatctcgataattcagtcgagggtccaaagagcaatttaagcagacagacaatgatggtgcttgcagttacattacataatataccggagggcatggcagtcggagtgctctacgcaagctggatatcaggaaccaccaccatcacgagggcagcagccctttcactggcaatcggaatagccatacagaactttccggagggcgcaatcatatccatgccattacatagcacaggaagctcaaagcttagagcctttgtatacggagtattgtcgggaatagtcgagccaatagcgggaatacttacgatacttgccatcggaataatagagccggtgatgccgtacctgctaagcttcgccgccggagccatgatatatgtagtcatagaagaactcgtgccggaaatgtcagagggaggacactcaaaccgcgccaccatagcatttatggtgggcttctgcctcatgatgacactcgatgtgatgctgggctaggcctgagcaaaccctcgcacagagcgagcccacggcaacagccgtgggcaaagcgacaagaaggtaaatagagccacaaccccacaattcaaatgcattgtgaaaaactgtgaaaaaaagggaaatttttcccggattatttggaaatttttaataaaacgcaaataaaaataaaataaatctaaacattcccaaaacgcaatagaaaaactgcacaaaaataaaaacttaaattgttgaaaatgtataaaaagctaactaaaaaatgtgaaactttgccagtcaaataatataaaaatgaaacgttgactttataaaacgatgtgactaaaatcaagtacaacgatagttgcttcttattaaatcaagaacaaacaaacatcaaaggtcagacaaaacacatcttgagttattaagaaacaatttgcgtatcaaatttcatatagcaaaaaagaaaggaggtaacgcagatggatgctctggtagatggactgttagaggaactcaattgtgacgtggtattcaagataccgatattcggaggcatacccatatacgagtcggtagtagtcacatggataataatggcagcggtatttttactgtgtttttttctcggcagaaatctttcagttgaaaatcccggacgcagacaggtagccgtagaggcaggagtcaaatttcttaatgatttcttcagtgagacacttggagaaaaaggaaaggattacataccatatctggcaacagtaatcatctatataggaatagcaaacctgataggattgcttggtttcaaaccgccgacaaaggatatgaacgtcaccgcagcactcgctgtaatgagcatagttcttatcgaggtggcaggaatcagggcaaagggcaccaaaaggtggcttaaaagctttgcagagccaatgccggtaatactacctatcaatatccttgagatctttatcaaaccattatcgctgtgtatgcgattatttggaaatgtccttggttcattcgtaatcatggagcttttaaagatggtcgtcccggcaatcgtcccggcagtattcagttgttattttgatatctttgatggacttatacaggcatatgtatttgtattcctgacaggacttttcatcaaggaggcaaccgagtaagaagacctgatgatgcatgaaacaccacatcatttaatttcacatcgtaagcatggaaaatgtaacctcgcttacaaaagaaacaaaataattgctaaccaaaagaaagcatataagcaagaaaaggagaacacattatgtcatcaacattattagtagcaatcggagctggaatcgcagtattaacaggaatcggagccggacttggaatcggtaaggcaacaagcagcgcagtagacgcaatcgcaagacagccggaggctgagagcaaaatctctaaatcacttcttttaggatgtgcccttgcagaggcaacagctatttacggtttcgttatcgcattacttatcatcctcttccttaaataatcaggcagcgtaactgacagttacaaccaggtgaaacagaaaggaaggtagagcaatgttaaaaattgatccatggaatataatatggacagtagtcaatctgcttttcctgtactggatatttaagaaattcctctttgaccgcgtgatgggcgtgatcaatcagagagacgaaatgattcagaagcagttctcggaagcaaagaagagtcaggacgatgcagaaagcttaaagagcgactataaaaagaagctcgagagtgcaaagactcaggcagaccagataatcctcgatgccagggaaagagccgaggctgagcaggagaaggctcttgagagaaccagacaggaagcagacagtatgcttgaaaaagcaaaagcggacattgctagcgagcaggagaaggcaacaaaggccgctgaggctgaaattgcaaaacttgccatcttagcagcgagaaagattgtaaagacaggtgaagctaatgacacaggcagcagtaaataatgcaatagttttgtacaggctggctgtagagcgtcgtgatgtggaggaagcacagagagtatactttgtgacagaaaagcttgcacagacgctcgcgaatccacttataccgctgacaaaaaagtatgacatcatagaaaaggtatacggatttgagagtgagccaaagcttatcacaagcttcataaaggaaatggtaaagcttggatatgccgctgaaatgaatgaaatctttgaggcatattacagatactgggatgagaaaaaccatatcataagagctgagcttatcagtgcagaggccgcaaccgacgaggaagcaaatgacgccaaggcgctgctacaaagcaaatatccggaatatgaaatatcccttacacagaaagtggacgaaacacttttaggtggatatgtgattaagactcttaatacagagtatgacagaagctacgaaggaaagcttcgtgagcttgaaagaaaattgaccaggaggtgacccctgtgggcgcaatcagtgcaacagacataatctccattatccagagcgagatagagaatttcgacttcgataccgagagccgtgagaccggcgaggtaatctacgtcggcgatggaatcgccacaatatacggcatcgaccatgccatgtacggtgagatcgtagtattcgataatggagtaaaaggaatggttcaggatatccgtcagaatgaaatcggtgtaatccttttcggaagagaccacggaatccatgaaggaaccaaagtagtaagaacaaagaaaaaagccggaatccctgtaggaaaaggctttatcggccgaatcatcaatgctttaggtgagcctattgatggaaagggcgatatcaaagaggaagattacagaccaatcgagaatgaggcaccgggtatcgtggacagaaagtcagtagatactccacttgagacaggaatcctctcaatcgattcaatgttcccaatcggacgtggacagcgagagcttatcatcggtgaccgtcagacaggaaagacatcaattgccacagatacaatcatcaaccagaagggcaaggatgttatctgtatatatgtagcaattggccagaaagcatcaacagtagcaaaaattgtgtcaactctgacaaaacacggcgcaatggattactcaatcgtgctttcatcaacagccagcgatcctgcatcactgcagtatatcgcaccatacgcaggaacagccatggcagagcatttcatgcatcagggcaaggatgtacttatcgtatatgatgacctttcaaagcatgcggtagcatacagagcactttcgctgttgctcgagagatcaccgggacgtgaggcatatcctggagacgtattctatctccactcaagactgctcgagagatcaagccgtctgagcgatgagctgggcggaggctcaataacagcactcccaatcatcgagacacaggcaggagacgtatcagcatatatccctaccaacgtaatatctatcacagacggacagatattcttagagagcaacctcttcaacgcaggtatgagaccggccgtaaacgtaggtctttcagtatcccgagttggtggagctgcccagacaaaggccatgaagaaggcatcaggaagcatccgtatcgacctggcacagtacagggagatggaggtcttcacacagtttgcatcagaccttgacgatgccacaaaagcacagcttgcacatggaaaagcacttatggagcttttaaaacagccgctttgccatccactgtcactgcatgagcaggtaatgacacttatcatggcaaaccatggtgtgtttgacacaattgagacaaaagatgtcaagaaatatcagggcgatatcctctcatatatggatctttcttatccggaaatcggacagaagatcgaagagaacagagccattgatgaagagctcgtaaataaaatcatggatgcagtaaaagagtataaagggtaacaggtagtattatggcaaacacgaaggaaatacaggatcgaataaaaagtatcaatgatacgcttaaaatcacaaatgccatgtatatgatttcttcttcgaagctgaaaaagtccaaaaagatgctggcagatacagagccgtatttcttcacactgcaatcagagatgagccgaatactcaggcatctgcctgatatggaggacatctatttcaagaccaacgaggataagctgcctgaggacagaaaggtcggatatatcgtaatcacagccgataaaggacttgcgggctcatacaaccacaatatcctgaaaatggctgaggagcacttaaagaatcatccgaaccattcacttttcgtactcggagagcttggacgtcattattttgaacagcgtggaattgagattgaaaaacagttccactacacagttcagaatccgacactcaaccgtgccagaaatattgcagaagaaattttggagctatatctacataacgagctggacgaagtttatattatctataccagcatgataaatgcgattcaggaggaaacacagatgtcacagcttctgccgctgaaaaaggcagacttcactgtgcagattcctatagatataccgagggaggagctggcactcaagccatcgcctgaggcagtcatggatcgtatcgtaccaaactacgttgttggatttgtctacggtgctcttgtagagtcattttcatgtgagcagaacgccagaatgatggcgatgcagtccgcatcaaacagtgcgagggacatgcttgcagagcttgacattctttacaaccgtgccagacaggcagcgattacacaggagattacagaggtaatagccggtgctaaatcgcagaagaaaaagagaaagtaggctttttgatgaaaacaggaaaaattatccaggttatgggtcctgttgtcgatgtagagttcgaggatgagaacctgccggcaatcagagacgcactagaagttttaaatggtgacaaaaaaagtgtgatggaagtcgcacagcatattggaaataatacagtacgctgtatcatgcttgcttccagtgagggacttcacagagatatggaagtaacagccacaggcgccggcatcaagacacctgtcggagagcagactctcggcagactgttcaacgtgctcggtgaagctatcgacggcggagcacagcctgatacagaagaaaagtgggaaatccacagagaaccaccaatatttgaggagcagaaccctgcagaggaaatcctcgagacaggtatcaaggtcatcgaccttcttgccccatatgcaaagggtggaaaaatcggactcttcggaggagccggagtaggaaaaacagtcctcatccaggagctcatcagcaatatcgcaacagagcacggcggctactcaatctttacaggagtcggagagcgttccagagagggaaatgatctctggacagaaatgaaggaatcaggagttctggaaaaaacagccctagtgttcggacagatgaacgagccaccaggagcacgtatgcgtgtagctgagacaggacttacaatggcagagtatttcagggatgagaagcaccagaacgtgctgcttttcatcgacaacatattccgtttcacacaggcaggttcagaggtttcagcacttttaggacgtatgccttcagccgtaggttatcagcctacactggctactgagatgggtgagctgcaggagagaatcgcatctacaaagaaaggttcagtaacatcggtacaggccgtatacgtacctgccgatgacctcacagacccggctccggctacaaccttcgcacatctggatgccacaacagttctttcaagaaagattgttgaacagggtatttacccggcagtagacccacttgagtctacatcacgtatcctcgagcctgatatcgtaggcgaggagcattaccaggtagcacgaaaggtacaggagattctccagaagtacaaggagctgcaggatatcatcgcaatcctcggtatggaggagctggcagatgaggacaaggtacttgtatacagagcaagaaaaatccagaagttcctctcacagccattccacgtagccgagaacttcacaggtatccagggtgtctatgtgcctgtagaggagactatcaagggcttcaaggccatcatagatggtgagatggacgagtatcctgagaacgcatttttcaatgtcggaacaatcgaggacgtcaaggaaaaagcaaagactatgcagcagtaaaagcataaggaaggacaaatcgtatggcaacaaatacattttatctaaaggtaatagctgctaacagagtgttttactcaggaagatgtcgttccataatagtccctgagttcgatggccagaaggaaatcctcgcccaccacgaggatatggtcatagccgtcgatgagggcgagatgagatttcagccggaggacagtgacaactgggagtacgcggtagtgggaatgggcttcgtagagatagtcaacaaccgtgtgacactgcttgtcgagacagccgagcatccggaggaaatcgatatagcaagggcaagagaggcaaaggagagagctgaggagcagcttcgccagaagcagagtattcaggagtattatcactcaagagcttcgctggcccgtgccatgacacgactgaaagcaacttcaggaaaataataaatgttaacaaattacaaaaaagaggttgtgataacctcttttttgtttttacatttgtgccggggcacactgttacagtacttgcctgcttccatgatatttgcggtgctggacacatgtatgcttatagagaacacctggactaataagataaatccattatatctatcatgtatatccaatatatattttaggtattgtgcaaaatttaatacactgtatatatggggcgggtattgaaatatccgccctttttttctataataataaaccgtgtggattgctgtaaatatgcaattgctgtgggtcacacgagagtgtggcagataacagcgaatatgagaaaaagaggcgaaaaaatgactgaaaaagaaaaaataaggattcagacatcagagacctttttgctgagtgcgattctggcactttccggaggatttcaggatgcctacacctacaacgtgagaaacaaggtgttctcgaatgcgcagacaggaaacgtggtgctgatgagccagcatctgatggtaggtgaatggatgaagggactatcgtatctttttccaatcctttcatttgcactcggtgtgcttgtggcagagagaatcgggcatagatataagaaggcaaagcgcatccactggcgtcagatagtggtggcgatagagataatcatactgtttgtggtgggctttataccacacaggtacgacatgatagcgaccatgcttgtatcattcagctgttctatgcaggtgcagtccttcagaaaggtaaacggctacggctatgccagcaccatgtgcatcggcaacttaagaagcggcacagagagcctgtcaatatatctgcgtgacagaaatatcggggcactgaaaaagaccgcgcactactatggaattattctgatatttgcaataggagcaggtataggcggagtgtgctcactgcacataggaatacgcgctatatgggcttcaagcgtgctgcttgccattgtatgtacaatgatggtcagggaacacagataaacagttacaaatagtcacgaaatatatataacggagatacaatataaaatgaaattattaaagcaatttctcatcatacttgcgatttcgtttgtaggtgagatactcaaatatttactgccattgcctgttccggcgagcatatatggcatggttatacttttcataggtctgctgacaggcctgataccgcttaactctgtaaggagtgcaggcaaattcatgatagagataatgcctgtcatgtttatccctgcgggagtgggacttatgtcatcctggggcaatcttaagccggtgctcgtaccggtgcttgtaatcacggttgtggcacttctaactgtaatgattgctacaggatatgtttcacagctcgtaatccgtatgcagaagcgcaagagggctgatgctggagaaaataaataagatagaggataatcataatggataatttgtttcagacatcgctttttgccggtgtcacagtaagtctggttgcatatctgataggtatgcttttaaagaagaagtttaagcttgcaatactcaatccgcttctcatttcaatagtactgaccatcatagtgcttgttgtggcagatgtggattatgacacatacaataagggagcatcgtaccttagctggtttctgacaccggccacggtatgccttgcgataccgctctatgagcagtggacactgctcaagaaaaatatagcagcagtcgcgctcggactcacggcaggcgtcataacaagccttgtgacagtgcttgtgctgtcagtgcttatgggactctcacacgaggactatgtcacactgcttccaaagtccatcacgacagctatcggtatgggcgtatcagaggagctcggaggatatgtgaccatcactgtcgcagttatcgtcgtaacaggtgtgcttggaaatatacttggagagtttgtatgcaaaatattcagaatcactgagcctatatcgaagggactggcgcttggtgcttcatcacatgccatcggaacagcgaaggcaatcgagatgggcgagatagagggcgccatgagctctcttgctatcgcggtggcaggaatacttacggtggtgtttgcatcggtgtttgcaaacttttattgatttgtctgagcgcttcctgcgcgttggcttttttacagaaaggagctatatttatatgataattactattgctagaaagtgcggttgcgatgcagatactattggtagagcagtcgctgagaaatatcatttacatttcatggacagagaggctattgcggccggtgccaaagaggcaggctgctacgatgagtatgaggagttttacagtgagagaccggttaatcctctgctttactctattgtgatggagacggaggaggataatgtgttgcatgatactccggggagagctcttacatttatagacaggctgccgcttgaggacggctgtgagggatatgtgattcagggacggtgtgcaaactttgcctttcagggaagagatgatgttgtctcagttttcctgacagcgaatgatgccttctgcgttgatactgtggctgatacacatggagtctcagcgagaaaggcaaagactgttgtgcgtgagacaaatgacaacagaaagacctatcacaaatactataccggacaggagtgggggcaggcagaaaactatgacctgtgcctgaatgtggaaaagctcggtgtagatggtgtgattgcgatgattgacagcttcatacaaaatagaaaatagaagtgtatatacaaaagccgaatccatgggagtgtggattcggctttttgagtttgttaatcgaggttattaatactttcaattatacataaatgaattaaagctgtaagtgcatcatcctttaaaccggcgtagttcatggtgataaatggctccggaaaaacaatgttgatgcgagcagtaagcgtcttgatgtatccaacgagtggtacgataaaaatagatggaaaagtccttggaagggatatggcatttccacagaagataggactttttatagaaaatatattggatatgcgtgataaaggctgtctgatattgctcagttcacacatagaactctggagcaaagattggtgagctccggagttttttgaataattttaagattttgtcacatttaattatataattcggttatatatagtgaaaacacaaatcgtacgatgaatgattttaaaactgctacaggaggtgtaatcattatgaatgagaaaagagcatcgattagatttatcgaaagatgctacaagttatatgaacagaaaatgtttcatgttgcatattgcatattaagggatgagggactggcagaggatgcggttcaggaagcatttttaaagttgatgaagagtaatgtggattttaaggatgcaaaatcagatgagtgtaagcagtatattattacgataataaagcatgcatccattgacatatataaccggaaaaagcgggaacaggaattaatatttttctcggatgagaatagtgattttgaccggagcaaaccagaagctttggacgaacaacagcagcagatcagagaagtgatggacaagcttcctgcaaagtattactcggtagttaactgcatggttgtaaaggaattgtctgtaaaagaaactgcaaacgaactttcaatttcagaagataatgtgcggaaacgatttgaaagagcaaaactgttacttaaaacaataatgaaaggatgtggcggatatgaagaatcaagagctgtatgatatttcgatagaggagtttgacaaaatgaatgaaaagcatgttttttcggaaaagtataagaaaaataagcaaaagatgttaaaggattacagaaagagtgtatggtcatcgacaggagctaaaacagcaaaagtggctgtggcatgtgcagcagtccttatagcaagtcctgttgtggcgaatgcagcatcaaacggagaacttttctcaagaatatggggaaaagcaggacacaaagatgtggcagctcatgaggaaacgatatatttgggagaggatgaaggaacatttactgcaagttatccggaaagaacatatgaagatgtgaacccacagaaagcagagtctcttattggagacagtatgtcttatccaaatattactaaggagattgatggcacaacaatcacaattttatccgttgtcagagataataattctgcagtgatcgagtatactcttgaaaaagcaggtggggtggatgctttaaattatagtcagttggataatgaggcaaaaggagcatggatttctgaggaatctacttttaattttagtataggaaatggaagtacaatagtagatttagaaaattcgacagatgaaaaactgtattgttatgaatatataacattagatgatgatcaaaattatgttgaaatgaagatagaggaatatccatgtaaattaaaggaaatttatgcgcttgattacaaagatcctaaacgtgaagaattagaaaatcaggttgtatcatcatcaaccaaaattccatttagcagtaatgtggtagcggagacaacatttgttaatcctgccggaggtaaaataaaagtttcacctttatctcttaaagtggacatgagcaaaggattcgggctcagcgaggttcaggcagcagatcctgtgaactgctattatgtagctataaattataaagatggaacaaattatgttgttatggaaagtaatgctgacggacgtcattcgtgtgacgttgaaaaagataacacggcttacagttgtggcactctgacgggagaatatgtgatgttgtttaatcgtctggtagacactgatcagatttcatctataacagttaatgatgttgagtatacgttagagtaagataagcttactatatatgagaactccgggcagattgctgctccggagtttttttattacctgtttaaatctattaccactatatattacaatataaaagtataagggcaaaaccttaagcgcttgaggataaaaagattggataaggagcttatgaataaaaaggaatttgaacaatttgttgaggagagtggaaaagacatattaagatattgccgcatgattgcatatagcaatgaagccggaaatgaactctatcaggacacaatgttaaaattgctagaaaagcaagagagcttagactgtgagcagaatataaagagctatgcaatatccatatcaattttgcttttaaagaacaaaaaacgtaagtacgcggtcagaaataaaaaggccgtgtttgtaagtctgaatgatttggcggatgaagatggaaagcagatacgaaatgaaaatatacttacacctgaagaacaatatatgaagaaggatgagacatatcttgtaaagcagctcgtatatgaactcccggaaaagtacaaaattccattatatatgaattattctgcaaatatgagtgccgaagatattgcaaagacattggacatcccacttggaactgtaaagacacgtatcaggaaagcaaaaaagatgttaaaggagagactggaggctataggatatgacagatgaaaaattggaaaaaatattacaacagacgcttattccgaaggtggcagatgaggatatttatctatacagaaaagtgcgaaaaagcagaaagaagtttgtcaagatatttgcagcagtagcggcatgtctggcactgattttaggaattaatgcaagcggaacttttacaattggtacagataaagatacagaccaaacagtagccgaaaatagtccgtttgttataacctgctatgcaaaagaattggaaaagggggtaagtgtaccgctcaagtttgccggatatgatgaaaatggctatgttataaacagaggagaagatggtgagagtgtagcttataataccgggatacgctttaaatgtgaaggcgataatattgccacagtaacttacagtataaagggagctgccttttggatttgtgaaaaacatggaaatagtataataactgattgtacagagtatacagggaaatattttaatgctggtggttttgcgccggaaggctgcaaggaagatgagacagatgaagaaaattatgatatacgtgagctttcaagttatacgttagcatatgataagcaggagtctgatacatctatatttgctatcaaaggtatgaaaaaaaataagaatatttatgagttatttgaatctgattttgtggatgataatgttgagggaattaccaaacttactgatgatgtagtgataacatgtacagttacctataatgatggaacctcagaaagtaaggagattggtcttaaagggattaaaaaaactataaaaaatgacggagaacagtcatgtgaggtagctgattttgcatgtgagcttaaataagaagggaactgatataaatgaataaaaaaacactaattaaagtatgcgcagttacatgtggattaagtctgacactagctggatgtacatcttcaaacaatagtaatgacataaacaatacagaaaattataatacagaaattaattctcaagatactgaaaaaacaggaagcaaagaaataataaataagaaaattgatgaaaatctatatattgatgcaaccttgcaaatgcctgaaacacagttaaatgaatataacactaaattaaaagattttaatctgaaggatattatgacttatctgtatccggatatagaggaaacagagctggtaactgatgaaagtggaggaatcggttatggtgctgcttatattggcggagaatcaggttccgtgagctattcaaaggatgatgatacatcatatctgcagttgctttgtggatatgcagatgaaaaaaagcttgcagaaactaaggcgctacagtttgaatctataaccgatgcaagggcaaaggtaaaagaactgactgataaaatgggaataccgggcgagcttggtaaagagaatattacggcatttaatagtgctgatttaaacaatatacaaagcaatatggaacaggattctgattataaagaccttctaagtgcaaaaaaacagcagagcagtacaattgggatagatacagaaatctattgttttacatatggaataaagatagacggtctgcaggtgtatgcaaatgatgatccgatattgcaacagacaagagatgtgctgattgcacagcctgtaaacattgaggttatgatatcaaatagaggaatagaatcagtttttgtatcaggaattatggatgagcctgatgtatgtaatgcaaatgttgatattatcggagaaaaggaaattacagaggctttaaataagaaattcggagacgtgatacttactgatgaatataaagttactaatatatggatggaatatttcccgcttttgcagaatgattcatttacggatataaaacttattcctgtatggtgtcttgattttgaagtaaatggaaatggtgctgaagatggtggatatacaattagaataaatgcaattacgggagatgaaatagcatgaataaagtcattagggcagaatttggcaggacaataaatgcaggacttataattgcgatagcaggtattattttttcaatatgctttgattcatttaacgatttgatagccggcttaagaaacggacagggatatgtaggatattttttctccaatgctgcttttggtggaatgtgtacccattatatgctgccggtatttacagcattgccattttctgtaagcttgtgtcaggaacgaaataataaagctgtttcctatattgtttccagagaaggaaaaaacagatatatatttgcaaaatttatcgttagtgctatatccggaggatttgttgcggcatgtggaactgtattgttgtttttaatgcttgcaatgcgatttcctattgccggagacgagtttgagggagcagtggtatcagattattttcatgaatggagcgctgtatattatccgcagttatatatactgacgttgagtatattggcattttgtcgtggtgttatatggtcaagtctggctctttgtgtatcattgtatacaagcgattttatggtagtacttctctctccttttttgggaagctatgtgctggtgcggatatttcagataataagggtacctgatatggttagaccggatatgattcttatagggcaggtagttataaaatcaagtggattgacgttgcttatagctattgccatatcacttacaattgtcacacttataggtgctttttttgttggaaaaatgaaggagggcttaaaaagtggaactatttattaaagcaaactgggtatcaagatataatcttcgtatgttatatgagaatataagaattccgattgcaatatttgtggctatgatatatgtaatggaatcacttaccgatattgcatcttttagcagtattgttaatgtaaaagtaacaccgtatgcttttgtatttgttataaacaactatagagtacagtttataatagcagcatgtgcgattattattttcggaaatgcgccatatgaaaatgagacatatcggtatatggtatcacgttccggaaaaacggcatggggacttggacaagtcatatatattattaaaatgacacttatatatgttgcaggtatttttgctgcaagcataattccatatataacccgaatagatttttccggagaatggggtaaaatatggggaacattaggtaaaactaacgcaggaacacagtatggcatacaattagcggtgtctccaaatataatagcaaattacacacctcttttagcactggtaataagtgttatactcgaattttgcagtgtgttatggctgggactggtgatatattggggcaataaaataaccggtaagggtgtaggaactgttattggtattatattatcggtgctggatgtgtgtatagcaaatgattggatgggttatgcgtataagttttcacctatgagcttgtcccagttagcgctgtattatggatatgcggcaaaatgggggctcaatcttggatatacatttaggttctttagcataacgctaattggactgggaactttatgtattgttgcaaataataagggaaaactggtaaagaggttaaagaatggaaaataaaagtttgattaagctgaatgatgttacggttaagtttaaagagcatttagtattggacaaggtatgtatggaatttgaatctgggaaaatatatggaataataggacgaaacggttcaggaaaaacagtgttgcttaaatgtgtttgcggattgatggatacaactgatggcacggtgtcagtcaatgggaaaatagtaggaaaagatgtggattttccggaaaatataggttttataattgaaaatcccggatttctaccacattattcaggttttaaaaatttgaaatatcttgcatcaatacgaggaacgataacagatgatgatataagaagatgtattagaactgttggtttggatccggacgataaaaaatcagtaaagcactattctcttggaatgaaacaaagacttggtcttgcacaggctatgatggaaaatccggacattcttatactggatgagccgatgaatgcacttgatagtataggcgtaagtgatataagagaaatactgcttgatcttaaagagcaggggaaactggttattttagccagtcacatacatgaggatatagaaatattgtgtgatgaggtcatgaagatagaggatggaaaggtcagtaagatgtaaaagagaacccaataacacaattattgtattttataaaataatccgctatactatgattaacagttatagcggatttttttatggaggctttgatggatagaacattaaaattaccggttggaatagataattttgaaaaaatacgaaaatcgggcttttattatatagataaaacgaggcttatagagcagctcctgcaaaattggggagaagtaaatctttttacccgtccgcgtcgtttcggtaagactcttaatatgagtatgtttaagagtttttttgaaataggtacggataaatctatatttgatggcttgtatatttcacaaaatacagctttatgcaatgaatacatggggaaatatccggttgtgtttatatcatttaaagatgttaacgggttaacgtttgacagggcatatgatgcacttgtccagataataggtgaaatagcaaatggattttcgttcctaatgaatagtgataagctcagtaaaaatgaaaaagagcagtatcagggaattatacagattaaagatggaaaatatcatatgagtgatggtgtggttatttcatcattaaaagtgttatctcagcttttgactaaacactatggcaagaatactatttttataatagacgaatatgatgtaccgctggataaagcattccagcacggttactacgatgaaatggtcgagcttatcagaggtattttgggaaaagttttaaaaacaaatgattatttacaatttgcaattcttacagggtgtcttcgtatctcgaaagaaagcatttttaccggaataaataattttaaagttttatcgattcttgatgccagatttgacgagcagtttggattttcggatgatgaggtgaaaaatcttcttgcagactatggactggcatcacattttgaagaggcaaaggagtggtatgatggttatcattttggtaatgtggatgtatactgtccttgggatgttataaattatgtggacaatcttgttgccaatccaactgccagaccacagacttactggataaacagtagcggaaacagccttgtaagacgccttataaatatagctgattcgacaaccaaggatgaggttgagcgcttaattgccggagagtctattgaaaaagtggttcatcttgaacttacgtacaatgaaatagacaaaaatatagataatatatggagtgtactttttactacaggatacctgacaaaagtaggtgaagtgaaattgccggatagtgagaattatgcacttaaacttgttatcccaaacaaagaggtcagagaagtttttattctgcagatacaggaatggttcaaggaagttgtagcaaaggacaatgatgagatcagagtgctgtcaaaggctattcttgaggctgacactgaaaagattcagagacagctcaatataatcatggatcgtatgataagtattctggacactaaggctcgcgatagacagaaagaaaatttctaccatggtcttttgcttggccttttgagaggaagcaatccgaactggctgatcaaatcgaacagggaatcaggggatggattcagtgacattatcataaaaccggaggatcctgattcgggaattatcatagaggtcaaatatgcaacgtcttttcaaggattggataaatcttgtgaagatgcaatgaatcagataaatacacgcagatatgatgctgtacttcgtgaagagggcagatgcaatatcataaaatacggaattgcatttcataagaagcgctgtaaggtggtatcggataagtaaatagacttaataaaaagatattctgataaataggttgatagtaaagtcgtgacaaaaatccattgcaataattaaaattgcaatggatttttttattttacaactatgacacatcacaggtttataatcatcataacaattaaacatcagcaagcaaaggagaagaaagagtatgaagaggaaaaaaattacagcaataatggcggtgatcatgatggcagcggggctttcagcctgctcacattcaaatgccaggctagagggaaaatccggtattgtaaaggatgaggcttcaaagaaagaaggtgacaccggtgtagtagaccaggctcctgctacgtatgtgctggatgcggagtatgttaacaaagacgatatcgtgtcagttgatgatacaattgagataaatggaattacttataaaattgaaaagtatgagcataccacagagtttggaaacagaaataaggatactgttttggattatttgaaagatttatatggtgaagctattgatgataattataatctgagtaatggtaatagttatatttttataacattgacaatcgtttataaggatggagatgataagcagattgaaggtaatagaaatgtgggtgttctgtatgccatcaaggatgatatggagagaatacaggaaaactcagattgtgtatatatagacaactattggcttggaggagatgaaagtgacgtatatcattatgttttaggcaaaggcgagtgtattacatcagagcttggatatattattcaggatgagggaatacctgaagattctaagtatatttattattgtatagagggtatagattcaaaaaccaatgataaggtgcaaaaatattttaaactggagctgtagttatgaatagaatatttaaacttgaaataaaacgtgcttttagaaacagattatttgctgccacattgtgtgttgcgtttgcaatatgtgtatggcattttatggaaaatgtgtggatatggaggatgtatgtttactacgacacgtatccattgtctgcatatgagaaatggataggtgcggataatgcaagtgtgcagccgttgctgctttatctgataatgcctgctttgtgtgccataccgtatggcagaagcttttattttgatgttaaatcagggtatgctgcccagatcatatcaagaggaaagaagagcgattatataagagcaaaatatggagctgcatttgtaagcggtgcgcttattggaatgataccactggtgtttgactttatgcttactgcaatggtatttccgatggtaataccacaggtaggaacaggcacattcccggtagcggcaatggatatcatgtcaggggtattttatacacatccacttgtatacaatctgatttttgtgctgattgatggctgcttctggggacttttaaactgtgcggtgttgtgggctgttaattttgtaagaagccggttctggatcctgctgacaccgtttatcatatacatatttgtgttctgcatggttcattttgtaaacagggtgagtttatcaccggtaatgtttcttagaccaagtgcaccgtttagaaatgatatccgggttgtgatctgtgcgtttattatccttatagtggtaaatattatattttacatacatgcggtaaagaaagagcttgttgcttatgaataggagaatttttgcaaatctgatcttatatgatatcagaaaaggatttagggaaaacaagataaaatggatagtcggagtattcatatttgtatttttttcatttatcaccgtcagtgattttagtgtaaattcaccggagcttggatttttggcatactttacaaatatacttcagggtatgccgccatacataaagacagatgacagcgtatttaccattccggtgtcgtggtttttgttttatgcgtttttattttttatggtaggattttatccattgtcagatctgtatggtgcaggcaaaaagacactgatattgtctggcagcaggtttaagtggttatggagtaagtacatatggacgctcataaatgtgattatgtattatgctgcaatgatacttgttcttgcggctgtgacatgtgcaatcgggaagtggagcacaaagcctgatgatatgctcatggaaatgggaatagatatgcagcggttttcgaccggaaatgaagtgattgtatggctgatactgccaatgttatgcgcctgtacaattgcggtggtgcagcttactatcagtatttttgccggtgcgatcgctggatatattgtttcaatagtttatcttgtggtgtctgtttactgggtgagtccgtttcttatgggcaattatcttatgatcatcagaaacaacaggctctgtgcgggcggaatggatgcggctgccggaataataagctgcattattgtgatggtggtttctattgtgtccggaagtgtgtattttaacagaaagaatattttgtgaggtattttatgaagatagagatagaacatgtttctaaaaagataaaggatgctctggtactcgatgatgtatgcatgacactggaaagtggtaatatatatggatttaagggcgtaaacggctccggcaagacaatgctgatgagagcggtaagcggacttatgtatcctacaagcggtaccatcagtatcgacggcaaggtgcttggaaaaaatatggcttttccggaaaggataggaatgcttattgagaatcctgcctttatagatagttatacaggctatgacaatctaaaaatgcttgcatcaataaataaaggtgaagttgatataagcagggcacttgaaacggttggactgaacccacacgataagagaaagtatagaaaatattctcttggaatgaagcagagactgggtattgcctgtgccattatggaggaaccaaagcttcttttgctggatgaaccttttaacgccctggacaaggaggggcaggaaaaactgtcagaaatcataagggatatgcgtgataaaggaagtcttatactgcttagctctcacgataaggatgagcttgaaaatctatcagatgtaatctatctggtggacagcggaaggtttaaattgaagtgacgaggagaatttattatgaagcaaagaaaatcaaaacaagtaaggcttttttcgggaatgctcataggaattgtgatgattgctgttttggcaaggattgtttatctgaatcattgctatccatccccaaaggtcatcacatatacagacaatgacactataaagcttggaaattatgagataaagcagaccggatgggagtggggcgatggcagtctcctaaaagaaaaatgtcctgattatgcatatgatcagacggatgatggttcagaatatcctttcgacagtgtgcgtgtgggttttataaccttgtcagttaccaaagtaaaggacgatacaacatcacttgatcttacaagccttgcatttgaaatgggaaccaatggtgatcagtatgacatggagctgttttttgcattaaatcctactttggaagctttggagataaagcttaatgccggtgaggagacgtcctttgtgataccgtatgcaatgaatgaggatctggtttcaaagaaagactggagcagggtagataagatgaagctgtatatggtgctgcagtattatccgcagaagataaggttgtgttgtaactgatttttaatttttaattgatctatataaaatgtaccaaaagtgaataaaaaatgtcatctcatgtaaattgtattgaaaaaaatggggaaatgaatataattgaaattgtaatcgatttctaataacaataattattgttattaagtaacttaaaacatagtatagtaaaggagaagtctatggggaaaagatgcaatacaaaaggtatgatttataaagttgtataaaaaagataaaaatatgttagccggtatgttttccataccggctaattgtgttacaaaatggggggaattatatatgaacaaacatcataaaacaatactaataccagccatttgcattgcagcattttttaccatgtctgcatgtgcagacagcaaaatggcagatacacagcagaagaatacagcggataaatcagacacgcagcaggggattgatatagctgcgtatgagaaaaagcttgccgataacagggagaattataagctaggctgtgagcagtacagcacagataccgatatgatagttcaagactgtcagagaatacagaagacccaaggaaattcaacattccttgggtcttttctttttgtcaaaatctaagaatttgtgtctaatagtaacacaatagtaacacactagaaacaataaaggtgaataaattcagcataaacagttgacaatatgctgaataaatactatatttatccttgtaagaactgaagttattcagcaaagaaaggatggtcaatatgttaactgaaatgcacattaaatctaaaaagcaaaagaaaagatttcttcatgcatacatgaaagaattagaatactatgattctttgaatacagaatttaaaacaaaaagaaaaataattgtaaacactgatagaagaaaaaaagttagatatattgatgaaaacaataatataacaggaataacaaaatgggtttggtattatgaaatattctataaaccttgtgatttcataagaagtaaacaaataaatgatttttatagaagaaaatgtgaagaagggtgacgaacatcacccttctttttttttaattatattttatttattgcttcaagtttaaaaggtaattcaatatgtgtgtaaactgtttctgtgacaccttgacccttgtgaccaactatctttttgatgattctttcatcaacacctgcttcagtaagcaatgatacacaggtgtgtcttgtgtcatgtgggcggtgctgaagtttcaattcttccatcaatggtgtccaataactgtcataatagtttctataaagaaaatgcttatcatcaggtgtgcaaatcagatattcacaatccctgtctaaccaatattggaagaatggaacaactttttcagcaattggaacttccctgattcctgattctgtttttgattcccttacatagaaccatctttcatcaagatgaacatcttccttcttcaggtcaagcaattcaccaattctgacacctgtataaatcagcatcaggatgactgaataatatatatttgaatccttgaccttccaaaccatgtcaacctgcttcttgctaaatggtttcctgttatatgcatttgggtttcctgccttgctgatatcaacatatctgaccatatcccttttatcagcagttacaatttcatgcatcactgcatagtcatacatcagaccaaacatgattttcatcttcttcaatgttggtgtgttctttcctgattcatcaacagcctgttgaagatggtcaagtttgatttccacaaacttcatgttatgtaacttttcgcatgacctgaaggatgcattataacccttgcaattagattcagacacctttggaaaatgcacttcagaccacttttcaaatacttcagcaaatgtgattgtattgtgatgcaggtcataagggtctttgttataatctgcaagggcggtcaatgcttcctttctactttcataatatccaacaaaagcataaattggatatgacttctgtttttcttcatcaaatgtccatcctgttgtcttccttgcaacccaaggtttccttcgatttcctgacaacttatagacacttccaaaaccatttggtaaacgcataaatagacacttcctttcttaaaattgggtgactttaacaaagggttgtgatatacttatgttggttaaatttgtgtgtatagcacaatcctttgataagacctgactacttccaatagttgggtctttttttttttgttcttggtgttcttctgttcttggtgttcttggttatatactactatatatatatttatatttttattagtcatttagtgtttcatctttattttcttaaaagtattatagataaaacaccaagaacacaaagaacacctagaacagcacgaacaattatcactgtatatagtgaattataaaacttcttcctgattttgttcttttaatctttccttcttttcttaaagaatacactatttctttaacagcatcttggtcttctgtattaaataatttccaaaattctgattgaagtatgttgtcattttcaataagtgcctgaacaacagtaggtttcatttcttggattttcctttgaagttctaaaatatgattttgcttattttcataatctttttgaagattgttaaaatttgattctaattcattcagttcatcacatctttttgaaatataatcattagttgtcaaaatattatgaaaccaaaaatcaaagcattcacctttttcttcacacagtttttcacaatccttcaaatatataataaatgattttaaggcaggtcttaattcttttggtgattttccaagggcattacaccatgaattcaagaaataggaatattcattttcaattttatttaagaaatctttatttgcatatatccatccccaaggaagttcaccattttcatctaaatgatttaacatatcatgatttggttctttcttctttttcttaaaaagattcagcatatcatcacatcccttcttagaatttctgtctgttttcaatgacccttccaatgatttgaacaggcttttcaatgatgtccttgttggaaaagtacattggtgcatatgtaggattgaaagattgaagaacaattccatcatcctgtttcaacagcttctttacacaagcactgtcaccattcacttgtgcaatcacaatatcacctgattctgcatcagactgttgtttgacaatcagaacatcacctgcttgcattcttggtgacatggaatcaccttttacctgaagaccaaagaattcacctgtctgtgcaagtctgaatggtatttcttcccaatccaatacttcttcaatagcttcaattggaattcctgcaactacctgaccaagaacaggaatcctgcatcctttttcaatccttgttgattcatctgataatgcttctgaattatactgagcatcccacattgcttcttgttcagatttatattctgattcacctgtcagataactgattgaaacaccaaagtaatttgcaagtttggtcatggttgtattatttggtgtgaatgtcttccacttagatgatgaccctgcaccaagacctgcttccctttctaactgtctttttgaaatctttctttccttacataattggttgattctgtctataaattccatagcaattcccctttcttaaaaaagtgcagaataaattcagcgaaaagtgttgacaaactgctgaagaactgctaatatacatagtgtcaggcgcagaactaattcagcagactgatataaacaaaagtcgcttgatgttttaaatatatgttggtggtacttcatatgatagaacatcttcagcaatttgtcaatattttatgctgaatttttacgcacttgctgaacaaattatgtaaggaaaggtaggtgaaaatgatgtcagaatttgaaaagcaggtcagacatgcattgattgatagggatatgacaatgacagaccttgcaaatgaattaggaatcacaatttcttatgtatctgatttactgaaaggtaaaagaaccaatcaggaacagcttcagagaattaaagagttccttgaaatcactgacacagatgattatgaagaataggttatcagttgcaactgttgcggaactgatgaatgtgtcagaacagttcatcagaataggtcttcagaagggaatcttcccttttggttatgcagtcaagatgtcaacacaatggacttattacattagtccacaaaaattcacagaacacacaggaattactgtgtcatagaaaggagaacattatggaaggttataaagtttttgaacctgattggacatgcaggggatttcaatatgaagtaggaaagacatttgaagaagatgtcacacctttttgttgcaacagaggatttcatttttgcaaagaattaaaggactgcttcaattattatccattcaatcctgacaacaaagttgcaaaggtcattgcattgggtgaaattgatgaagaatcagatgatagcaaatgttgcaccaacaagattcagattgttgaagaaatcagttgggaagatgttttaagaatggtcaaccttggaaaaggaaatgcaggtctttgcaacagcggtaatcgcaacagcggtaatcgcaacagcggtgattggaacagcggtaatcgcaacagcggtaatcgcaacagcggtaatcgcaacagcggtgattggaacagcggtaatcgcaacagcggtaatcgcaacagcggtgattggaacagcggtgatcgcaacagaaaaagcagtggaattacttttcataatccgttattgttaagttaccacacgaaacaactgaactaagaaagctccactgcctatgataagaataacattttccagtctcttccgcaatcggaattatgacgctaatgcacctccgaataggtagatgtaattattaacactacttattctggaggttttattatgtataaagatatttttgaatccatccgcaatgaagcggaaaaacgtaaccttttatgcaatggttacctctttcaaggcataccgcacagacctccctaggtaccacacgtttcttcctctccatccatctgcctcatttatcatgcatgattccgtgtagttattgggctttaacatgggttgctgtcttacccacatgcatgacctcatatgagatttctgttcgtcagaccagagatttgcccgtgagttggtatattcctcacatccagcttccttcagattccacctcacgatggacacccttgccttcggctatatccttcccactaccaggcggattcgggactttaacccgttagaaacgtgcgccgctaggcgcacaacaagcgtgtgagccatgtgccgagaaaagctgctattgtgtaatgcgtgcccgtaccgtaaaccgacacaggtggatgaggagagaatcctaaggccgacggaagaagcattgttaaggaattcggcaaaatgaccccgtaacttcgggagaaggggtgcctgcgagagcaggccgcagagaataggctcaagcaactgtttagcaaaaacacaggtctatgcgaaaccgaaaggtgaagtatatgggctgacgcctgcccggtgctggaaggttaagaggagaggttagcgaaagcgaagctttgaatttaagccccagtaaacggcggccgtaactataacggtcctaaggtagcgaaattccttgtcgggtaagttccgacccgcacgaaaggcgtaatgatttgagcactgtctcgacaatgcatccggtgaaattgaagtaccagtgaagatgctggttacccgcgccaggacggaaagaccccatggagctttactccagtttgatactgggattcggtactgcatgtacaggataggtgggagacgaagaaggatggacgccagtctgtccggagtcgctgttgggataccacccctgtagtactgggtttctaaccagttaccatgatctggtaatgggacaatgtcaggcggggagtttgactggggcggtcgcctccgaaagggtatcggaggcgctcaaaggttccctcagaatggttggaaaccatttgaagagtgcaaaggcagaagggagcttgactgcgacaccgacgggtggagcaggtacgaaagtaggacttagtgatccggtggtataaagtgggattgccatcgctcaacggataaaagctaccctggggataacaggcttatcactcccaagagttcacatcgacggagtggtttggcacctcgatgtcggctcatcgcatcctggggctgtagcaggtcccaagggttgggctgttcgcccattaaagcggtacgcgagctgggttcagaacgtcgtgagacagttcggtccctatccggcgcgggcggaggatatttgagaggagctgtccttagtacgagaggaccgggatggacggaccactggtgtatctgttgtcgaccaacggcatggcagagtagccaagtctggaagggataaacgctgaaggcatctaagcgtgaagcccccctcaagatgagatatccctccttcgggagtaagaccccttgaagactacaaggtagatagggcagaggtggaagcatggcaacatgtggagctgactgttactaataggtcgagggcttaatctggttaataacgcctaagacaaagagcggaactaggcaagtgccattaagcaaagaaacgatacaggcatttcaacgggttatgaagaaacgcccaaagacagacccatttgtgatagacggacggggcaacttcttatttgtcaatcccaaaggcaagcctaaagttgcgattgattacagcactttatttgtccgtatggtaaagaaatacaacaagcaccacatggacaaccctttgccacatatcacaccgcatacgctacgccatacgttctgatggtaaagaaatacaacaagcaccacatggacaaccctttgccacatatcacaccgcatacgctacgccatacgttctgcacaagactggcaagcaagaacatgaacccgaaagatttacagtatatcatggggcattcaaatatcagtatcacaatgaactggtacgctcatgcgtccatagataccgcaaaatcagaggttcagcgtctaatcgcataagaagtatttaccacgattttaaccacgattgatgcaaattctgctcgaacggtacgcctattccgaaatcggcggtacattcattctgatttagtggtacgcgttttctgctcaaaacggtacgtttttcctttattattgtgatgtaactattattcatcacagtgcaaaggaggaactattatgcacgactacaatactattcttggagtcataggacttcggctcagtaaagtcagttatgactctgtacaaaaacgttaccggatcggacggagcgggattgcattaatcatgaaccgctacaaggattcaggcttatcattggatgatcttcgacaaatgccagcctcaaaggtggttgatctcatctatccaaaagaaaaccttcgacataaggatattccactgcctgattttgaaaaaatacatgagcagatgatccaaatgggaaaacatgctgacttgagttttctatggattgattataaaaaagagcatcctaacggttaccagcttgctcagttttataagctgtatcgtgattttatggtagatacttatggtacttcaaaaacatctatgcctgtggaacgaatccctggtgaaaagatgtatattgactgggtaggcgaccagccggaactactattggatacaacaactgacgaacttcggaaagttcacatttttacaactacacttggttttagcagccttgtttatgcagagatctttccggatgaaaaacttccacattttattaccggcacagtacatgcactgtcttattatggggcagttcctaaatatcttgtcccggacaatctgagaacagctgttaccaggcatagtaaagatgaacttgtgctgcagtcagctttttcagatctggaaactttttatgatacgatcattctgccgccaccaccaaggaaaccgaaaggcaaaccaacagttgaaaatcatgtgcgtttcttggagacgcatctggtagaagaattaaagaaagatacttatacctctctggaagctctgaatgctgcggtcaaaaagatcgtagcggacatcaaccagcgtcctttccagaaaaaatctgacattcggaaatcccgcatgaatggattcgaaaagtacgacaaaccgcgtatgaaccagcttccaggcgaaagttatacactttgtgattataaatactttcttaaagttccagataattaccaccttgagtatgatgcccactactattctgtattgtatacctataaagggaagcctgcaattcttaaggctacaatgacagagatacggatctgtgatgagtataaccggctgatctgccgccatccaagatcttaccgtgattttcctctttacattacagatgacagtcatatgcctccagaacacctatattacaaagaagtgaatgcacatgacggagcttattacagacgatgggcatctgtttatggagaatctatggtaactcttattgacaggatactccgcagttccaagcatgaggaacaggcatacaacagctgtgccggtgtactccattcctgtaaagatgttcctcacaggctggttcaggaggctgctgagaaatgcgtagaagccaatgcctgcaagtattcttatttcaagaaagtacttagcatggttcagaataatcattccagcagtgctataaacggaaccggaaaacttccttcccatacaaacatccgtggaaaggaggcatacaaatgagttcatcccatgacattacattaacacctcaggaacaggctctgattatgcgtctgaagagtttccgtgttccagaaatggcacatatcctggaagaacagttgaaagatcctaatgcagatctgaacacttttatggaacgcataacagcaatggttgatgcagagtggcaggcgcgggcagagaaacgttttaatcgtctgatgaaagaagcgcatctgcgatacccggcggcggatcttgacgaaactatttaccgtccagaacgtcagcttgatacccagacaatagaacgactgagtacctgccattggatagaggaaggaaagaatctcattgtaacaggatcttctgccagtggaaaaacttatctaatcaatgctttttgtgtaactgcaatgaagcagtctaagagtgtaaagtatataaaagcgaacactcttatgagcgaaatggaacaggcacgtatcaaatctacaaatctggattacctgaataagctgaccaagctggatcttcttgtgatcgatgattttggccttatggatctcgatcttgataaatgccgggatctttttgaagtccttgacaccagggatggaagaaaatcaactgtagtcatctcacagtttccagtcagtacatggtttgatatgtttgctgataatacctacgctgatgcgtgccttacacgaatcacagataaacatcatacatatcgtctggaaatgaacggtataaatatgcgtgaaacagaatgatatcatctagcggtacttcgtaccgttaaaaatggaatagccgttccgcagtagcggaactggcattccgtttgagcgtaatttgcaaactaccgtatcaaagacatgacagaatctacagttacattttctgctaaagattacaaaaaccaagggctttggaaagagatcaccatatccggcgaggaatttatccgtcgatttttaatgcatgttcctccaaaacgttttgtacgtatcaggcactatggtcttctttcatccagaaataagaagacctcccccgcttgtaccggtctttccattcccggctcgtgctttccacatgcgtccctacagttctgataatgcgtggtacaggaatctaaacctgttatccatcgcttacgtcttgcgacctgtgcttaggccccgacttacccagagcagatcagctttactctggaaaccttagatattcggccgaaaggattcaactaccgtatcaaagacatgacagaatctacagttacattttctgctaaagattacaaaaaccaagggctttggaaagaaatcaccatatccggagaggaatttatccatcgatttttaatgcatgttcctccaaaacgttttgtacgtatcaggcactatggtcttctttcatccagaaataagaagatccactgctttttatttaggaaaagaaaaactgcgtcacagccttggcaggccatcgcgcagcgattttgttcaatttgaatttgtaaaggagatatacaacatgaagaaagtgtgcttagcggttttgccagctttaacaatagtgttagaattattacccttgggagcagtttgtatttttgcaacatctccaacagaaagagtaaaagaaacattctcatactttagccttacaccgtttggtctgctcctttccttgttggaaagagccttgatatgacttgtgttcatcataacacatacaaggctcatttgcattagattgcgtccaatttatcaatgaccttttcaaactgtcggcgtttaatctgtatgcggttgccattcataatgagccagccagcgtccttgttttcctctgccaagctcggatgtcttgattgttagatattcttaagaatagaatatttattcatcaaatcatttgtatgaagttttcaaggtacactgctgtgatcaccagttttagttctcacagacttttgactgttttatcagtcattagaaatcttaatctcttaaaatctctaatctgatcaccagttttagttctcacagacttttgactgttttatcagtcattagaaatcttaatctcttaaaatctctaatcgctggtaaaaccagttttttataaatccggcagccacctaccttcccataccgttaccagtatagtattatcggccgcttcagtcttaaccatcgtgttcgggatgtggacgggtgtttcccaaaagcgcatcgccaccggaagtttgaacacttagcgaggtgttttcgagcttagtgtgaaacttgttcgatttgcgcaagcaaagtcgaacttcctcagcttacctcagtgttatttgttattaaataatcattaataactcaacagcgaaaaactctctactcgatttccttagaaaggaggtgatccagccgcaccttccgatacggctaccttgttacgacttcactgcgccgaaaatgtccggggctgaaacacgacaccgaagccgtggactcgcaatgcgagtggtagaggagcattcttaagaccgacgaagctgtaccgtaaggagcagtggagggataagaagagagaatgccggaatgagtagcgagagaaaggtgggaatcctttcggccgaatatcaaatcgttaaggaaagaatcgaaggtggtgcaaacgaaaaagcagtattgagacttttcattaactgccctctcgtttgcatcaatttcgattttttctggttgaacaaagcgcgtcaactctatatggacttttaattctgacactctatttataataggatagcgtgtacacatagaaacacatagaatttataattcagatcaaccataagaagatgaagttcttcatcctctgaatccttaagattgtttactgctgaaagtaacataccgcaagattcaattcccatcatctttctaggtggaagatttgtgatggcaataagtgtctttccaacaagctcttctggctcataataagcatggattccgcttaaaatagtgcggtctgtgcctgttccgtcatctaaagtaaactgtaataatttctttgacttaggaactgctacacactcttttaccttaacagctctgaaatctgacttgctgaatgtatcaaagtctacttcttcctcaaataaaggttcaatctttacattagagaaatcaatcttctccggctcagcttttacctcttctgaaggcttagaacttacgccattttcatcctttacgccaccaatgctcttcatagtattatcggccgcttcagtcttaaccatcgtgttcgggatgtggacgggtgtttcccaaaagcgcatcgccaccggaagtttgaacacttagcgaggtgttttcgagcttagtgtgaaacttgttcgatttgcgcaagcaaagtcgaacttcctcagcttacctcagtgttatttgttattaaataatcattaataactcaacagcatctccattatgatgacatttcccgtaccaacatgacaattcatgttcgtgaaaccaaaggcagaattgacaggtatacaattctgtctcaaaaaaatttagaccttctcacagagtattggttcaaatgtggtcgccctaaagatatccttttcccaaggcgtccatagataccgcaaaatcagaggttcagcgtctaatcgcataagaagtatttaccacgattttaaccacgattgatagcgaaaatataagaagatagacctaggtatgtgagatttaccacaaaagcaaaatgcccgtagagccgataaaataaggctttgcggacatttgagaagatataaaaagatagttagaatacatccagacggtcagactcttttatctcaataggagagtatttgctgtttagtgatacgagatagagtctgtctgcatatcttttcagctttttaatgtaagcctcattgttcagtccgaatatacctatctcaccatcacatagggtatcctgctgtgatacccacgcaatctctccgctgtgaaattccggttccatactgtcaccactgacgatttcggatgtcttgattgttagatattcttaagaatagaatatttattcatcaaatcatttgtatgaagttttcaaggtacaatgtcgattataacagttttattacatcgacgatggagacggagagattcgaactcttgaccccctgcttgcaaggcaggtgctctcccaactgagctacgccccc
